(19) United States
(12) Patent Application Publication
(10) Pub. No.: US 2004/0048253 A1
(43) Pub. Date: Mar. 11, 2004

(54) Molecules for diagnostics and therapeutics

(76) Inventors: Scott R. Panzer, Sunnyvale, CA (US); Peter A. Spiro, Palo Alto, CA (US); Steven C. Banville, Palo Alto, CA (US); Purvi Shah, San Jose, CA (US); Michael S. Chalup, Sunnyvale, CA (US); Simon C Chang, Mountain View, CA (US); Alice J. Chen, San Jose, CA (US); Steven A. D'Sa, East Palo, CA (US); Stefan Amshey, San Francisco, CA (US); Christopher E. Dahl, Fremont, CA (US); Tam C. Dam, San Jose, CA (US); Susan E. Daniels, Palo Alto, CA (US); Gerard E. Dufour, Castro Valley, CA (US); Vincent Flores, Union City, CA (US); Willy T. Fong, San Francisco, CA (US); Lila B. Greenawalt, San Jose, CA (US); Jennifer L. Jackson, Mountain View, CA (US); Anissa L. Jones, San Jose, CA (US); Tommy F. Liu, Daly City, CA (US); Ann M. Roseberry Lincoln, Redwood City, CA (US); Bruce H. Rosen, Menlo Park, CA (US); Frank D. Russo, Rossette Court Sunnyvale, CA (US); Theresa K. Stockdreher, Sunnyvale, CA (US); Abel Daffo, San Jose, CA (US); Rachel J. Wright, Mountain View, CA (US); Pierre E. Yap, Lafayette, CA (US); Jimmy Y. Yu, Fremont, CA (US); Diana L. Bradley, Soquel, CA (US); Shawn R. Bratcher, Mountain View, CA (US); Wensheng Chen, Mountain View, CA (US); Howard J. Cohen, Palo Alto, CA (US); David M. Hodgson, Ann Arbor, MI (US); Stephen E. Lincoln, Redwood City, CA (US); Stuart E. Jackson, Mountain View, CA (US)

Correspondence Address: Incyte Genomics Inc, Legal Department, 3160 Porter Drive, Palo Alto, CA, 94304, US

(21) Appl. No.: 10/220,120

(22) PCT Filed: Feb. 21, 2001
(86) PCT No.: PCT/US01/06059

(51) Int. Cl. C12Q 1/68; C07H 21/04; C07K 14/47; A61K 38/17

(52) U.S. Cl. 435/6; 435/69.1; 435/320.1; 435/325; 530/350; 536/23.5

(57) ABSTRACT

The present invention provides purified human polynucleotides for diagnostics and therapeutics (dithp). Also encompassed are the polypeptides (DITHP) encoded by dithp. The invention also provides for the use of dithp, or complements, oligonucleotides, or fragments thereof in diagnostic assays. The invention further provides for vectors and host cells containing dithp for the expression of DITHP. The invention additionally provides for the use of isolated and purified DITHP to induce antibodies and to screen libraries of compounds and the use of anti-DITHP antibodies in diagnostic assays. Also provided are microarrays containing dithp and methods of use.

### TECHNICAL FIELD

[0001] The present invention relates to human molecules and to the use of these sequences ill the diagnosis, study, prevention, and treatment of diseases associated with, as well as effects of exogenous compounds on, the expression of human molecules.

### BACKGROUND OF THE INVENTION

[0002] The human genome is comprised of thousands of genes, many encoding gene products that function in the maintenance and growth of the various cells and tissues in the body. Aberrant expression or mutations in these genes and their products is the cause of, or is associated with, a variety of human diseases such as cancer and other cell proliferative disorders, autoimmune/inflammatory disorders, infections, developmental disorders, endocine disorders, metabolic disorders, neurological disorders, gastrointestinal disorders, transport disorders, and connective tissue disorders. The identification of these genes and their products is the basis of an ever-expanding effort to find markers for early detection of diseases, and targets for their prevention and treatment. Therefore, these genes and their products are useful as diagnostics and therapeutics. These genes may encode, for example, enzyme molecules, molecules associated with growth and development, biochemical pathway molecules, extracellular information transmission molecules, receptor molecules, intracellular signaling molecules, membrane transport molecules, protein modification and maintenance molecules, nucleic acid synthesis and modification molecules, adhesion molecules, antigen recognition molecules, secreted and extracellular matrix molecules, cytoskeletal molecules, ribosomal molecules, electron transfer associated molecules, transcription factor molecules, chromatin molecules, cell membrane molecules, and organelle associated molecules.

[0003] For example, cancer represents a type of cell proliferative disorder that affects nearly every tissue in the body. A wide variety of molecules, either aberrantly expressed or mutated, can be the cause of, or involved with, various cancers because tissue growth involves complex and ordered patterns of cell proliferation, cell differentiation, and apoptosis. Cell proliferation must be regulated to maintain both the number of cells and their spatial organization. This regulation depends upon the appropriate expression of proteins which control cell cycle progression in response to extracellular signals such as growth factors and other mitogens, and intracellular cues such as DNA damage or nutrient starvation. Molecules which directly or indirectly modulate cell cycle progression fall into several categories, including growth factors and their receptors, second messenger and signal transduction proteins, oncogene products, tumor-suppressor proteins, and mitosis-promoting factors. Aberrant expression or mutations in any of these gene products can result in cell proliferative disorders such as cancer. Oncogenes are genes generally derived from normal genes that, through abnormal expression or mutation, can effect the transformation of a normal cell to a malignant one (oncogenesis). Oncoproteins, encoded by oncogenes, can affect cell proliferation in a variety of ways and include growth factors, growth factor receptors, intracellular signal transducers, nuclear transcription factors, and cell-cycle control proteins. In contrast, tumor-suppressor genes are involved in inhibiting cell proliferation. Mutations which cause reduced function or loss of function in tumor-suppressor genes result in aberrant cell proliferation and cancer. Although many different genes and their products have been found to be associated with cell proliferative disorders such as cancer, many more may exist that are yet to be discovered.

[0004] DNA-based arrays can provide a simple way to explore the expression of a single polymorphic gene or a large number of genes. When the expression of a single gene is explored, DNA-based arrays are employed to detect the expression of specific gene variants. For example, a p53 tumor suppressor gene array is used to determine whether individuals are carrying mutations that predispose them to cancer. A cytocbrome p450 gene array is useful to determine whether individuals have one of a number of specific mutations that could result in increased drug metabolism, drug resistance or drug toxicity.

[0005] DNA-based array technology is especially relevant for the rapid screening of expression of a large number of genes. There is a growing awareness that gene expression is affected in a global fashion. A genetic predisposition, disease or therapeutic treatment may affect, directly or indirectly, the expression of a large number of genes. In some cases the interactions may be expected, such as when the genes are part of the same signaling pathway. In other cases, such as when the genes participate in separate signaling pathways, the interactions may be totally unexpected. Therefore, DNA based arrays can be used to investigate how genetic predisposition, disease, or therapeutic treatment affects the expression of a large number of genes.

[0006] Enzyme Molecules

[0007] The cellular processes of biogenesis and biodegradation involve a number of key enzyme classes including oxidoreductases, transferases, hydrolases, lyases, isomerases, and ligases. These enzyme classes are each comprised of numerous substrate-specific enzymes having precise and well regulated functions. These enzymes function by facilitating metabolic processes such as glycolysis, the tricarboxylic cycle, and fatty acid metabolism; synthesis or degradation of amino acids, steroids, phospholipids, alcohols, etc.; regulation of cell signalling, proliferation, inflamation, apoptosis, etc., and through catalyzing critical steps in DNA replication and repair, and the process of translation.

[0008] Oxidoreductases

[0009] Many pathways of biogenesis and biodegradation require oxidoreductase (dehydrogenase or reductase) activity, coupled to the reduction or oxidation of a donor or acceptor cofactor. Potential cofactors include cytochromes, oxygen, disulfide, iron-sulfur proteins, flavin adenine dinucleotide (FAD), and the nicotinamide adenine dinucleotides NAD and NADP (Newsholme, E. A and A. R. Leech (1983) Biochemistry for the Medical Sciences, John Wiley and Sons, Chichester, U.K, pp. 779-793). Reductase activity catalyzes the transfer of electrons between substrate(s) and cofactor(s) with concurrent oxidation of the cofactor. The reverse dehydrogenase reaction catalyzes the reduction of a cofactor and consequent oxidation of the substrate. Oxidoreductase enzymes are a broad superfamily of proteins that catalyze numerous reactions in all cells of organisms ranging from bacteria to plants to humans. These reactions include metabolism of sugar, certain detoxification reactions in the liver, and the synthesis or degradation of fatty acids, amino acids, glucocorticoids, estrogens, androgens, and prostaglandins. Different family members are named according to the direction in which their reactions are typically catalyzed; thus they may be referred to as oxidoreductases, oxidases, reductases, or dehydrogenases. In addition, family members often have distinct cellular localizations, including the cytosol, the plasma membrane, mitochondrial inner or outer membrane, and peroxisomes.

[0010] Short-chain alcohol dehydrogenases (SCADs) are a family of dehydrogenases that only share 15% to 30% sequence identity, with similarity predominantly in the coenzyme binding domain and the substrate binding domain. In addition to the well-known role in detoxification of ethanol, SCADs are also involved in synthesis and degradation of fatty acids, steroids, and some prostaglandins, and are therefore implicated in a variety of disorders such as lipid storage disease, myopathy, SCAD deficiency, and certain genetic disorders. For example, retinol dehydrogenase is a SCAD-family member (Simon, A. et al. (1995) J. Biol. Chem. 270:1107-1112) that converts retinol to retinal, the precursor of retinoic acid. Retinoic acid, a regulator of differentiation and apoptosis, has been shown to down-regulate genes involved in cell proliferation and inflammation (Chai, X. et al. (1995) J. Biol. Chem. 270:3900-3904). In addition, retinol dehydrogenase has been linked to hereditary eye diseases such as autosomal recessive childhood-onset severe retinal dystrophy (Simon, A et al; (1996) Genomics 36:424-430).

[0011] Propagation of nerve impulses, modulation of cell proliferation and differentiation, induction of the immune response, and tissue homeostasis involve neurotransmitter metabolism (Weiss, B. (1991) Neurotoxicology 12:379-386; Collins, S. M. et al. (1992) Ann N.Y. Acad. Sci. 664:415424; Brown, J. K. and H. Imam (1991) J. Inherit. Metab. Dis. 14:436-458). Many pathways of neurotransmitter metabolism require oxidoreductase activity, coupled to reduction or oxidation of a cofactor, such as NAD⁺/NADH (Newsholme, E. A. and A. R. Leech (1983) Biochemistry for the Medical Sciences, John Wiley and Sons, Chichester, U.K pp. 779-793). Degradation of catecholamies (epinephrine or norepinephrine) requires alcohol dehydrogenase (in the brain) or aldehyde dehydrogenase (in peripheral tissue). NAD⁺-dependent aldehyde dehydrogenase oxidizes 5-hydroxyindole-3-acetate (the product of 5-hydroxytryptamine (serotonin) metabolism) in the brain, blood platelets, liver and pulmonary endothelium (Newsholme, supra, p. 786). Other neurotransmitter degradation pathways that utilize NAD⁺/NADH-dependent oxidoreductase activity include those of L-DOPA (precursor of dopamine, a neuronal excitatory compound), glycine (an inhibitory neurotransmitter in the brain and spinal cord), histamine (liberated from mast cells during the inflammatory response), and taurine (an inhibitory neurotransmitter of the brain stem, spinal cord and retina) (Newsholme, supra, pp. 790, 792). Epigenetic or genetic defects in neurotransmitter metabolic pathways can result in a spectrum of disease states in different tissues including Parkinson disease and inherited myoclonus (McCance, K. L. and S. E. Huether (1994) Pathophysiology, Mosby-Year Book, Inc., St Louis Mo., pp. 402-404; Gundlach, AL. (1990) FASEB J. 4:2761-2766).

[0012] Tetrahydrofolate is a derivatized glutamate molecule that acts as a carrier, providing activated is, one-carbon units to a wide variety of biosynthetic reactions, including synthesis of purines, pyrimidines, and the amino acid methionine. Tetrahydrofolate is generated by the activity of a holoenzyme complex called tetrahydrofolate synthase, which includes three enzyme activities: tetrahydrofolate dehydrogenase, tetrahydrofolate cyclohydrolase, and tetrahydrofolate synthetase. Thus, tetrahydrofolate dehydrogenase plays an important role in generating building blocks for nucleic and amino acids, crucial to proliferating cells.

[0013] 3-Hydroxyacyl-CoA dehydrogenase (3HACD) is involved in fatty acid metabolism. It catalyzes the reduction of 3-hydroxyacyl-CoA to 3-oxoacyl-CoA, with concomitant oxidation of NAD to NADH, in the mitochondria and peroxisomes of eukaryotic cells. In peroxisomes, 3HACD and enoyl-CoA hydratase form an enzyme complex called bifunctional enzyme, defects in which are associated with peroxisomal bifunctional enzyme deficiency. This interruption in fatty acid metabolism produces accumulation of very-long chain fatty acids, disrupting development of the brain, bone, and adrenal glands. Infants born with this deficiency typically die within 6 months (Watkins, P. et al. (1989) J. Clin. Invest. 83:771-777; Online Mendelian Inheritance in Man (OMIM) #261-515). The neurodegeneration that is characteristic of Alzheimer's disease involves development of extracellular plaques in certain brain regions. A major protein component of these plaques is the peptide amyloid-β (Aβ), which is one of several cleavage products of amyloid precursor protein (APP). 3HACD has been shown to bind the Aβ peptide, and is overexpressed in neurons affected in Alzheimer's disease. In addition, an antibody against 3HACD can block the toxic effects of Aβ in a cell culture model of Alzheimer's disease (Yan, S. et al. (1997) Nature 389:689-695; OMIM, #602057).

[0014] Steroids, such as estrogen, testosterone, corticosterone, and others, are generated from a common precursor, cholesterol, and are interconverted into one another. A wide variety of enzymes act upon cholesterol, including a number of dehydrogenases. Steroid dehydrogenases, such as the hydroxysteroid dehydrogenases, are involved in hypertension, fertility, and cancer (Duax, W. L. and D. Ghosh (1997) Steroids 62:95-100). One such dehydrogenase is 3-oxo-5-α-steroid dehydrogenase (OASD), a microsomal membrane protein highly expressed in prostate and other androgen-responsive tissues. OASD catalyzes the conversion of testosterone into dihydrotestosterone, which is the most potent androgen. Dihydrotestosterone is essential for the formation of the male phenotype during embryogenesis, as well as for proper androgen-mediated growth of tissues such as the prostate and male genitalia. A defect in OASD that prevents the conversion of testosterone into dihydrotestosterone leads to a rare form of male pseudohermaphroditis, characterized by defective formation of the external genitalia (Andersson, S. et al. (1991) Nature 354:159-161; Labrie, F. et al. (1992) Endocrinology 131:1571-1573; OMIM #264600). Thus, OASD plays a central role in sexual differentiation and androgen physiology.

[0015] 17β-hydroxysteroid dehydrogenase (17βHSD6) plays an important role in the regulation of the male reproductive hormone, dihydrotestosterone (DHTT). 17βHSD6 acts to reduce levels of DHTT by oxidizing a precursor of DHTT, 3α-diol, to androsterone which is readily glucuronidated and removed from tissues. 17βHSD6 is active with both androgen and estrogen substrates when expressed in embryonic kidney 293 cells. At least five other isozymes of 17 βHSD have been identified that catalyze oxidation and/or reduction reactions in various tissues with preferences for different steroid substrates (Biswas, M. G. and D. W. Russell (1997) J. Biol. Chem. 272:15959-15966). For example, 17,HSD1 preferentially reduces estradiol and is abundant in the ovary and placenta 17βHSD2 catalyzes oxidation of androgens and is present in the endometrium and placenta. 17βHSD3 is exclusively a reductive enzyme in the testis (Geissler, W. M. et al. (1994) Nat. Genet. 7:34-39). An excess of androgens such as DHTT can contribute to certain disease states such as benign prostatic hyperplasia and prostate cancer.

[0016] Oxidoreductases are components of the fatty acid metabolism pathways in mitochondria and peroxisomes. The main beta-oxidation pathway degrades both saturated and unsaturated fatty acids, while the auxiliary pathway performs additional steps required for the degradation of unsaturated fatty acids. The auxiliary beta-oxidation enzyme 2,4-dienoyl-CoA reductase catalyzes the removal of even-numbered double bonds from unsaturated fatty acids prior to their entry into the main beta-oxidation pathway. The enzyme may also remove odd-numbered double bonds from unsaturated fatty acids (Koivuranta, K. T. et al. (1994) Biochem. J. 304:787-792; Smeland, T. E. et al. (1992) Proc.

[0017] Natl. Acad. Sci. USA 89:6673-6677). 2,4-dienoyl-CoA reductase is located in both mitochondria and peroxisomes. Inherited deficiencies in mitochondrial and peroxisomal beta-oxidation enzymes are associated with severe diseases, some of which manifest themselves soon after birth and lead to death within a few years. Defects in beta-oxidation are associated with Reye's syndrome, Zellweger syndrome, neonatal adrenoleukodystrophy, infantile Refsum's disease, acyl-CoA oxidase deficiency, and bifunctional protein deficiency (Suzuki, Y. et al. (1994) Am. J. Hum. Genet. 54:36-43; Hoefler, supra; Cotran, R. S. et al. (1994) Robbins Pathologic Basis of Disease, W. B. Saunders Co., Philadelphia Pa., p.866). Peroxisomal beta-oxidation is impaired in cancerous tissue. Although neoplastic human breast epithelial cells have the same number of peroxisomes as do normal cells, fatty acyl-CoA oxidase activity is lower than in control tissue (el Bouhtoury, F. et al. (1992) J. Pathol. 166:27-35). Human colon carcinomas have fewer peroxisomes than normal colon tissue and have lower fatty-acyl-CoA oxidase and bifunctional enzyme (including enoyl-CoA hydratase) activities than normal tissue (Cable, S. et al. (1992) Virchows Arch. B Cell Pathol. Incl. Mol. Pathol. 62:221-226). Another important oxidoreductase is isocitrate dehydrogenase, which catalyzes the conversion of isocitrate to a-ketoglutarate, a substrate of the citric acid cycle. Isocitrate dehydrogenase can be either NAD or NADP dependent, and is found in the cytosol, mitochondria, and peroxisomes. Activity of isocitrate dehydrogenase is regulated developmentally, and by hormones, neurotransmitters, and growth factors.

[0018] Hydroxypyruvate reductase (HPR), a peroxisomal 2-hydroxyacid dehydrogenase in the glycolate pathway, catalyzes the conversion of hydroxypyruvate to glycerate with the oxidation of both NADH and NADPH. The reverse dehydrogenase reaction reduces NAD⁺and NADP⁺. HPR recycles nucleotides and bases back into pathways leading to the synthesis of ATP and GTP. ATP and GTP are used to produce DNA and RNA and to control various aspects of signal transduction and energy metabolism. Inhibitors of purine nucleotide biosynthesis have long been employed as antiproliferative agents to treat cancer and viral diseases. HPR also regulates biochemical synthesis of serine and cellular serine levels available for protein synthesis.

[0019] The mitochondrial electron transport (or respiratory) chain is a series of oxidoreductase-type enzyme complexes in the mitochondrial membrane that is responsible for the transport of electrons from NADH through a series of redox centers within these complexes to oxygen, and the coupling of this oxidation to the synthesis of ATP (oxidative phosphorylation). ATP then provides the primary source of energy for driving a cell's many energy-requiring reactions. The key complexes in the respiratory chain are NADH:ubiquinone oxidoreductase (complex I), succinate:ubiquinone oxidoreductase (complex II), cytochrome c₁-b oxidoreductase (complex III), cytochrome c oxidase (complex IV), and ATP synthase (complex V) (Alberts, B. et al. (1994) Molecular Biology of the Cell, Garland Publishing, Inc., New York N.Y., pp. 677-678). All of these complexes are located on the inner matrix side of the mitochondrial membrane except complex II, which is on the cytosolic side. Complex II transports electrons generated in the citric acid cycle to the respiratory chain. The electrons generated by oxidation of succinate to fumarate in the citric acid cycle are transferred through electron carriers in complex II to membrane bound ubiquinone (Q). Transcriptional regulation of these nuclear-encoded genes appears to be the predominant means for controlling the biogenesis of respiratory enzymes. Defects and altered expression of enzymes in the respiratory chain are associated with a variety of disease conditions.

[0020] Other dehydrogenase activities using NAD as a cofactor are also important in mitochondrial function. 3-hydroxyisobutyrate dehydrogenase (3HBD), important in valine catabolism, catalyzes the NAD-dependent oxidation of 3-hydroxyisobutyrate to methylmalonate semialdehyde within mitochondria. Elevated levels of 3-hydroxyisobutyrate have been reported in a number of disease states, including ketoacidosis, methylmalonic acidemia, and other disorders associated with deficiencies in methylmalonate semialdehyde dehydrogenase (Rougraff, P. M. et al. (1989) J. Biol. Chem. 264:5899-5903).

[0021] Another mitochondrial dehydrogenase important in amino acid metabolism is the enzyme isovaleryl-CoA-dehydrogenase (IVD). IVD is involved in leucine metabolism and catalyzes the oxidation of isovaleryl-CoA to 3-methylcrotonyl-CoA. Human IVD is a tetrameric flavoprotein that is encoded in the nucleus and synthesized in the cytosol as a 45 kDa precursor with a mitochondrial import signal sequence. A genetic deficiency, caused by a mutation in the gene encoding IVD, results in the condition known as isovaleric acidemia. This mutation results in inefficient mitochondrial import and processing of the IVD precursor (Vockley, J. et al. (1992) J. Biol. Chem. 267:2494-2501).

[0022] Transferases

[0023] Transferases are enzymes that catalyze the transfer of molecular groups. The reaction may involve an oxidation, reduction, or cleavage of covalent bonds, and is often specific to a substrate or to particular sites on a type of substrate. Transferases participate in reactions essential to such functions as synthesis and degradation of cell components, regulation of cell functions including cell signaling, cell proliferation, inflamation, apoptosis, secretion and excretion. Transferases are involved in key steps in disease processes involving these functions. Transferases are frequently classified according to the type of group transferred. For example, methyl transferases transfer one-carbon methyl groups, amino transferases transfer nitrogenous amino groups, and similarly denominated enzymes transfer aldehyde or ketone, acyl, glycosyl, alkyl or aryl, isoprenyl, saccharyl, phosphorous-containing, sulfur-containing, or selenium-containing groups, as well as small enzymatic groups such as Coenzyme A

[0024] Acyl transferases include peroxisomal carnitine octanoyl transferase, which is involved in the fatty acid beta-oxidation pathway, and mitochondrial carnitine palmitoyl transferases, involved in fatty acid metabolism and transport. Choline O-acetyl transferase catalyzes the biosynthesis of the neurotransmitter acetylcholine.

[0025] Amino transferases play key roles in protein synthesis and degradation, and they contribute to other processes as well. For example, the amino transferase 5-aminolevulinic acid synthase catalyzes the addition of succinyl-CoA to glycine, the first step in heme biosynthesis. Other amino transferases participate in pathways important for neurological function and metabolism. For example, glutamine-phenylpyruvate amino transferase, also known as glutamine transaminase K (GTK), catalyzes several reactions with a pyridoxal phosphate cofactor. GTK catalyzes the reversible conversion of L-glutamine and phenylpyruvate to 2-oxoglutaramate and L-phenylalanine. Other amino acid substrates for GTK include L-methionine, L-histidine, and L-tyrosine. GTK also catalyzes the conversion of kynurenine to kynurenic acid, a tryptophan metabolite that is an antagonist of the N-methyl-D-aspartate (NMDA) receptor in the brain and may exert a neuromodulatory function. Alteration of the kynurenine metabolic pathway may be associated with several neurological disorders. GTK also plays a role in the metabolism of halogenated xenobiotics conjugated to glutathione, leading to nephrotoxicity in rats and neurotoxicity in humans. GTK is expressed in kidney, liver, and brain. Both human and rat GTKs contain a putative pyridoxal phosphate binding site (ExPASy ENZYME: EC 2.6.1.64; Perry, S. J. et al. (1993) Mol. Pharmacol. 43:660-665; Perry, S. et al. (1995) FEBS Lett 360:277-280; and Alberati-Giani, D. et al. (1995) J. Neurochem. 64:1448-1455). A second amino transferase associated with this pathway is kynurenine/α-aminoadipate amino transferase (AadAT. AadAT catalyzes the reversible conversion of α-aminoadipate and α-ketoglutarate to α-ketoadipate and L-glutamate during lysine metabolism. AadAT also catalyzes the transamination of kynurenine to kynurenic acid. A cytosolic AadAT is expressed in rat kidney, liver, and brain (Nakatani, Y. et al. (1970) Biochim Biophys. Acta 198:219-228; Buchli, R. et al. (1995) J. Biol. Chem. 270:29330-29335).

[0026] Glycosyl transferases include the mammalian UDP-glucouronosyl transferases, a family of membrane-bound microsomal enzymes catalyzing the transfer of glucouronic acid to lipophilic substrates in reactions that play important roles in detoxification and excretion of drugs, carcinogens, and other foreign substances. Another mammalian glycosyl transferase, mammalian UDP-galactose-ceramide galactosyl transferase, catalyzes the transfer of galactose to ceramide in the synthesis of galactocerebrosides in myelin membranes of the nervous system. The UDP-glycosyl transferases share a conserved signature domain of about 50 amino acid residues (PROSITE: PDOC00359, http://expasyhcuge.ch/sprotfprosite html).

[0027] Methyl transferases are involved in a variety of pharmacologically important processes. Nicotinamide N-methyl transferase catalyzes the N-methylation of nicotinamides and other pyridines, an important step in the cellular handling of drugs and other foreign compounds. Phenylethanolamine N-methyl transferase catalyzes the conversion of noradrenalin to adrenalin 6-O-methylguanine-DNA methyl transferase reverses DNA methylation, an important step in carcinogenesis. Uroporphyrin-III C-methyl transferase, which catalyzes the transfer of two methyl groups from S-adenosyl-L-methionine to uroporphyrinogen III, is the first specific enzyme in the biosynthesis of cobalamin, a dietary enzyme whose uptake is deficient in pernicious anemia. Protein-arginine methyl transferases catalyze the posttranslational methylation of arginine residues in proteins, resulting in the mono- and dimethylation of arginine on the guanidino group. Substrates include histones, myelin basic protein, and heterogeneous nuclear ribonucleoproteins involved in mRNA processing, splicing, and transport. Protein-arginine methyl transferase interacts with proteins upregulated by mitogens, with proteins involved in chronic lymphocytic leukemia, and with interferon, suggesting an important role for methylation in cytokine receptor signaling (Lin, W. -J. et is al. (1996) J. Biol. Chem. 271:15034-15044; Abramovich, C. et al. (1997) EMBO J. 16:260-266; and Scott, H. S. et al. (1998) Genomics 48:330-340).

[0028] Phosphotransferases catalyze the transfer of high-energy phosphate groups and are important in energy-requiring and-releasing reactions. The metabolic enzyme creatine kinase catalyzes the reversible phosphate transfer between creatine/creatine phosphate and ATP/ADP. Glycocyamine kinase catalyzes phosphate transfer from ATP to guanidoacetate, and arginine kinase catalyzes phosphate transfer from ATP to arginine. A cysteine-containing active site is conserved in this family (PROSITE: PDOC00103).

[0029] Prenyl transferases are heterodimers, consisting of an alpha and a beta subunit, that catalyze the transfer of an isoprenyl group. An example of a prenyl transferase is the mammalian protein farnesyl transferase. The alpha subunit of farnesyl transferase consists of 5 repeats of 34 amino acids each, with each repeat containing an invariant tryptophan (PROSITE: PDOC00703).

[0030] Saccharyl transferases are glycating enzymes involved in a variety of metabolic processes. Oligosacchryl transferase-48, for example, is a receptor for advanced glycation endproducts. Accumulation of these endproducts is observed in vascular complications of diabetes, macrovascular disease, renal insufficiency, and Alzheimer's disease (Thornalley, P. J. (1998) Cell Mol. Biol. (Noisy-Le-Grand) 44:1013-1023).

[0031] Coenzyme A (CoA) transferase catalyzes the transfer of CoA between two carboxylic acids. Succinyl CoA.3-oxoacid CoA transferase, for example, transfers CoA from succinyl-CoA to a recipient such as acetoacetate. Acetoacetate is essential to the metabolism of ketone bodies, which accumulate in tissues affected by metabolic disorders such as diabetes (PROSITE: PDOC00980).

[0032] Hydrolases

[0033] Hydrolysis is the breaking of a covalent bond in a substrate by introduction of a molecule of water. The reaction involves a nucleophilic attack by the water molecule's oxygen atom on a target bond in the substrate. The water molecule is split across the target bond, breaking the bond and generating two product molecules. Hydrolases participate in reactions essential to such functions as synthesis and degradation of cell components, and for regulation of cell functions including cell signaling, cell proliferation, inflamation, apoptosis, secretion and excretion. Hydrolases are involved in key steps in disease processes involving these functions. Hydrolytic enzymes, or hydrolases, may be grouped by substrate specificity into classes including phosphatases, peptidases, lysophospholipases, phosphodiesterases, glycosidases, and glyoxalases.

[0034] Phosphatases hydrolytically remove phosphate groups from proteins, an energy-providing step that regulates many cellular processes, including intracellular signaling pathways that in turn control cell growth and differentiation, cell-cell contact, the cell cycle, and oncogenesis.

[0035] Lysophospholipases (LPLs) regulate intracellular lipids by catalyzing the hydrolysis of ester bonds to remove an acyl group, a key step in lipid degradation. Small LPL isoforms, approximately 15-30 kD, function as hydrolases; larger isoforms function both as hydrolases and transacylases. A particular substrate for LPLs, lysophosphatidylcholine, causes lysis of cell membranes. LPL activity is regulated by signaling molecules important in numerous pathways, including the inflammatory response.

[0036] Peptidases, also called proteases, cleave peptide bonds that form the backbone of peptide or protein chains. Proteolytic processing is essential to cell growth, differentiation, remodeling, and homeostasis as well as inflammation and immune response. Since typical protein half-lives range from hours to a few days, peptidases are continually cleaving precursor proteins to their active form, removing signal sequences from targeted proteins, and degrading aged or defective proteins. Peptidases function in bacterial, parasitic, and viral invasion and replication within a host. Examples of peptidases include trypsin and chymotrypsin (components of the complement cascade and the blood-clotting cascade) lysosomal cathepsins, calpains, pepsin, renin, and chymosin (Beynon, R. J. and J. S. Bond (1994) Proteolytic Enzymes: A Practical Approach, Oxford University Press, New York N.Y., pp. 1-5).

[0037] The phosphodiesterases catalyze the hydrolysis of one of the two ester bonds in a phosphodiester compound. Phosphodiesterases are therefore crucial to a variety of cellular processes. Phosphodiesterases include DNA and RNA endo- and exo-nucleases, which are essential to cell growth and replication as well as protein synthesis. Another phosphodiesterase is acid sphingomyelinase, which hydrolyzes the membrane phosphoilpid sphingomyelin to ceramide and phosphorylcholine. Phosphorylcholine is used in the synthesis of phosphatidylcholine, which is involved in numerous intracellular signaling pathways. Ceramide is an essential precursor for the generation of gangliosides, membrane lipids found in high concentration in neural tissue. Defective acid sphingomyelinase phosphodiesterase leads to a build-up of sphingomyelin molecules in lysosomes, resulting in Niemann-Pick disease.

[0038] Glycosidases catalyze the cleavage of hemiacetyl bonds of glycosides, which are compounds that contain one or more sugar. Mammalian lactase-phlorizin hydrolase, for example, is an intestinal enzyme that splits lactose. Mammalian beta-galactosidase removes the terminal galactose from gangliosides, glycoproteins, and glycosaminoglycans, and deficiency of this enzyme is associated with a gangliosidosis known as Morquio disease type B. Vertebrate lysosomal alpha-glucosidase, which hydrolyzes glycogen, maltose, and isomaltose, and vertebrate intestinal sucrase-isomaltase, which hydrolyzes sucrose, maltose, and isomaltose, are widely distributed members of this family with highly conserved sequences at their active sites.

[0039] The glyoxylase system is involved in gluconeogenesis, the production of glucose from storage compounds in the body. It consists of glyoxylase I, which catalyzes the formation of S-D-lactoylglutathione from methyglyoxal, a side product of triose-phosphate energy metabolism, and glyoxylase II, which hydrolyzes S-D-lactoylglutathione to D-lactic acid and reduced glutathione. Glyoxylases are involved in hyperglycemia, non-insulin-dependent diabetes mellitus, the detoxification of bacterial toxins, and in the control of cell proliferation and microtubule assembly.

[0040] Lyases

[0041] Lyases are a class of enzymes that catalyze the cleavage of C—C, C—O, C—N, C—S, C-(halide), P—O or other bonds without hydrolysis or oxidation to form two molecules, at least one of which contains a double bond (Stryer, L. (1995) Biochemistry W. H. Freeman and Co. New York, N.Y. p.620). Lyases are critical components of cellular biochemistry with roles in metabolic energy production including fatty acid metabolism, as well as other diverse enzymatic processes. Further classification of lyases reflects the type of bond cleaved as well as the nature of the cleaved group.

[0042] The group of C—C lyases include carboxyl-lyases (decarboxylases), aldehyde-lyases (aldolases), oxo-acid-lyases and others. The C—O lyase group includes hydro-lyases, lyases acting on polysaccharides and other lyases. The C—N lyase group includes ammonia-lyases, amidine-lyases, amine-lyases (deaminases) and other lyases.

[0043] Proper regulation of lyases is critical to normal physiology. For example, mutation induced deficiencies in the uroporphyrinogen decarboxylase can lead to photosensitive cutaneous lesions in the genetically-linked disorder familial porphyria cutanea tarda (Mendez, M. et al. (1998) Am. J. Genet. 63:1363-1375). It has also been shown that adenosine deaminase (ADA) deficiency stems from genetic mutations in the ADA gene, resulting in the disorder severe combined immunodeficiency disease (SCID) (Hershfield, M. S. (1998) Semin. Hematol. 35:291-298).

[0044] Isomerases

[0045] Isomerases are a class of enzymes that catalyze geometric or structural changes within a molecule to form a single product. This class includes racemases and epimerases, cis-trans-isomerases, intramolecular oxidoreductases, intramolecular transferases (mutases) and intramolecular lyases. Isomerases are critical components of cellular biochemistry with roles in metabolic energy production including glycolysis, as well as other diverse enzymatic processes (Stryer, L. (1995) Biochemistry, W. H. Freeman and Co., New York N.Y., pp.483-507).

[0046] Racemases are a subset of isomerases that catalyze inversion of a molecules configuration around the asymmetric carbon atom in a substrate having a single center of asymmetry, thereby interconverting two racemers. Epimerases are another subset of isomerases that catalyze inversion of configuration around an asymmetric carbon atom in a substrate with more than one center of symmetry, thereby interconverting two epimers. Racemases and epimerases can act on amino acids and derivatives, hydroxy acids and derivatives, as well as carbohydrates and derivatives. The interconversion of UDP-galactose and UDP-glucose is catalyzed by UDP-galactose4′-epimerase. Proper regulation and function of this epimerase is essential to the synthesis of glycoproteins and glycolipids. Elevated blood galactose levels have been correlated with UDP-galactose4′-epimerase deficiency in screening programs of infants (Gitzelmann, R. (1972) Helv. Paediat. Acta 27:125-130).

[0047] Oxidoreductases can be isomerases as well. Oxidoreductases catalyze the reversible transfer of electrons from a substrate that becomes oxidized to a substrate that becomes reduced. This class of enzymes includes dehydrogenases, hydroxylases, oxidases, oxygenases, peroxidases, and reductases. Proper maintenance of oxidoreductase levels is physiologically important. For example, genetically-linked deficiencies in lipoamide dehydrogenase can result in lactic acidosis (Robinson, B. H. et al. (1977) Pediat. Res. 11:1198-1202).

[0048] Another subgroup of isomerases are the transferases (or mutases). Transferases transfer a chemical group from one compound (the donor) to another compound (the acceptor). The types of groups transferred by these enzymes include acyl groups, amino groups, phosphate groups (phosphotransferases or phosphomutases), and others. The transferase carnitine palmitoyltransferase is an important component of fatty acid metabolism. Genetically-linked deficiencies in this transferase can lead to myopathy (Scriver, C. R. et al. (1995) The Metabolic and Molecular Basis of Inherited Disease, McGraw-Hill, New York N.Y., pp.1501-1533).

[0049] Yet another subgroup of isomerases are the topoisomersases. Topoisomerases are enzymes that affect the topological state of DNA. For example, defects in topoisomerases or their regulation can affect normal physiology. Reduced levels of topoisomerase II have been correlated with some of the DNA processing defects associated with the disorder ataxia-telangiectasia (Singh, S. P. et al. (1988) Nucleic Acids Res. 16:3919-3929).

[0050] Ligases

[0051] Ligases catalyze the formation of a bond between two substrate molecules. The process involves the hydrolysis of a pyrophosphate bond in ATP or a similar energy donor. Ligases are classified based on the nature of the type of bond they form, which can include carbon-oxygen, carbon-sulfur, carbon-nitrogen, carbon-carbon and phosphoric ester bonds.

[0052] Ligases forming carbon-oxygen bonds include the aminoacyl-transfer RNA (tRNA) synthetases which are important RNA-associated enzymes with roles in translation. Protein biosynthesis depends on each amino acid forming a linkage with the appropriate tRNA. The aminoacyl-tRNA synthetases are responsible for the activation and correct attachment of an ammo acid with its cognate tRNA. The 20 aminoacyl-tRNA synthetase enzymes can be divided into two structural classes, and each class is characterized by a distinctive topology of the catalytic domain.

[0053] Class I enzymes contain a catalytic domain based on the nucleotide-binding Rossman fold. Class II enzymes contain a central catalytic domain, which consists of a seven-stranded antiparallel β-sheet motif, as well as N- and C-terminal regulatory domains. Class II enzymes are separated into two groups based on the heterodimeric or homodimeric structure of the enzyme; the latter group is further subdivided by the structure of the N- and C-terminal regulatory domains (Hartlein, M. and S. Cusack (1995) J. Mol. Evol. 40:519-530). Autoantibodies against aminoacyl-tRNAs are generated by patients with dermatomyositis and polymyositis, and correlate strongly with complicating interstitial lung disease (ILD). These antibodies appear to be generated in response to viral infection, and coxsackie virus has been used to induce experimental viral myositis in animals.

[0054] Ligases forming carbon-sulfur bonds (Acid-thiol ligases) mediate a large number of cellular biosynthetic intermediary metabolism processes involve intermolecular transfer of carbon atom-containing substrates (carbon substrates). Examples of such reactions include the tricarboxylic acid cycle, synthesis of fatty acids and long-chain phospholipids, synthesis of alcohols and aldehydes, synthesis of intermediary metabolites, and reactions involved in the amino acid degradation pathways. Some of these reactions require input of energy, usually in the form of conversion of ATP to either ADP or AMP and pyrophosphate.

[0055] In many cases, a carbon substrate is derived from a small molecule containing at least two carbon atoms. The carbon substrate is often covalently bound to a larger molecule which acts as a carbon substrate carrier molecule within the cell. In the biosynthetic mechanisms described above, the carrier molecule is coenzyme A. Coenzyme A (CoA) is structurally related to derivatives of the nucleotide ADP and consists of 4′-phosphopantetheine linked via a phosphodiester bond to the alpha phosphate group of adenosine 3′,5′-bisphosphate. The terminal thiol group of 4′-phosphopantetheine acts as the site for carbon substrate bond formation. The predominant carbon substrates which utilize CoA as a carrier molecule during biosynthesis and intermediary metabolism in the cell are acetyl, succinyl, and propionyl moieties, collectively referred to as acyl groups. Other carbon substrates include enoyl lipid, which acts as a fatty acid oxidation intermediate, and carnitine, which acts as an acetyl-CoA flux regulator/mitochondrial acyl group transfer protein. Acyl-CoA and acetyl-CoA are synthesized in the cell by acyl-CoA synthetase and acetyl-CoA synthetase, respectively.

[0056] Activation of fatty acids is mediated by at least three forms of acyl-CoA synthetase activity: i) acetyl-CoA synthetase, which activates acetate and several other low molecular weight carboxylic acids and is found in muscle mitochondria and the cytosol of other tissues; ii) medium-chain acyl-CoA synthetase, which activates fatty acids containing between four and eleven carbon atoms (predominantly from dietary sources), and is present only in liver mitochondria; and iii) acyl CoA synthetase, which is specific for long chain fatty acids with between six and twenty carbon atoms, and is found in microsomes and the mitochondria. Proteins associated with acyl-CoA synthetase activity have been identified from many sources including bacteria, yeast, plants, mouse, and man. The activity of acyl-CoA synthetase may be modulated by phosphorylation of the enzyme by cAMP-dependent protein kinase.

[0057] Ligases forming carbon-nitrogen bonds include amide synthases such as glutamine synthetase (glutamate-ammonia ligase) that catalyzes the amination of glutamic acid to glutamine by ammonia using the energy of ATP hydrolysis. Glutamine is the primary source for the amino group in various amide transfer reactions involved in de novo pyrimidine nucleotide synthesis and in purine and pyrimidine ribonucleotide interconversions. Overexpression of glutamine synthetase has been observed in primary liver cancer (Christa, L. et al. (1994) Gastroent. 106:1312-1320).

[0058] Acid-amino-acid ligases (peptide synthases) are represented by the ubiquitin proteases which are associated with the ubiquitin conjugation system (UCS), a major pathway for the degradation of cellular proteins in eukaryotic cells and some bacteria. The UCS mediates the elimination of abnormal proteins and regulates the half-lives of important regulatory proteins that control cellular processes such as gene transcription and cell cycle progression. In the UCS pathway, proteins targeted for degradation are conjugated to a ubiquitin (Ub), a small heat stable protein. Ub is first activated by a ubiquitin-activating enzyme (E1), and then transferred to one of several Ub-conjugating enzymes (E2). E2 then links the Ub molecule through its C-terminal glycine to an internal lysine (acceptor lysine) of a target protein. The ubiquitinated protein is then recognized and degraded by proteasome, a large, multisubunit proteolytic enzyme complex, and ubiquitin is released for reutilization by ubiquitin protease. The UCS is implicated in the degradation of mitotic cyclic kinases, oncoproteins, tumor suppressor genes such as p53, viral proteins, cell surface receptors associated with signal transduction, transcriptional regulators, and mutated or damaged proteins (Ciechanover, A (1994) Cell 79:13-21). A murine proto-oncogene, Unp, encodes a nuclear ubiquitin protease whose overexpression leads to oncogenic transformation of NIH3T3 cells, and the human homolog of this gene is consistently elevated in small cell tumors and adenocarcinomas of the lung (Gray, D. A. (1995) Oncogene 10:2179-2183).

[0059] Cyclo-ligases and other carbon-nitrogen ligases comprise various enzymes and enzyme complexes that participate in the de novo pathways to purine and pyrimidine biosynthesis. Because these pathways are critical to the synthesis of nucleotides for replication of both RNA and DNA, many of these enzymes have been the targets of clinical agents for the treatment of cell proliferative disorders such as cancer and infectious diseases.

[0060] Purine biosynthesis occurs de novo from the amino acids glycine and glutamine, and other small molecules. Three of the key reactions in this process are catalyzed by a trifunctional enzyme composed of glycinamide-ribonucleotide synthetase (GARS), aminoimidazole ribonucleotide synthetase (AIRS), and glycinamide ribonucleotide transformylase (GART). Together these three enzymes combine ribosylamine phosphate with glycine to yield phosphoribosyl aminoimidazole, a precursor to both adenylate and guanylate nucleotides. This trifunctional protein has been implicated in the pathology of Downs syndrome (Aimi, J. et al. (1990) Nucleic Acid Res. 18:6665-6672). Adenylosuccinate synthetase catalyzes a later step in purine biosynthesis that converts inosinic acid to adenylosuccinate, a key step on the path to ATP synthesis. This enzyme is also similar to another carbon-nitrogen ligase, argininosuccinate synthetase, that catalyzes a similar reaction in the urea cycle (Powell, S. M. et al. (1992) FEBS Lett. 303:4-10).

[0061] Like the de novo biosynthesis of purines, de novo synthesis of the pyrimidine nucleotides uridylate and cytidylate also arises from a common precursor, in this instance the nucleotide orotidylate derived from orotate and phosphoribosyl pyrophosphate (PPRP). Again a trifunctional enzyme comprising three carbon-nitrogen ligases plays a key role in the process. In this case the enzymes aspartate transcarbamylase (ATCase), carbamyl phosphate synthetase II, and dihydroorotase (DHOase) are encoded by a single gene called CAD. Together these three enzymes combine the initial reactants in pyrimidine biosynthesis, glutamine, CO₂, and ATP to form dihydroorotate, the precursor to orotate and orotidylate (Iwahana, H. et al. (1996) Biochem. Biophys. Res. Commun. 219:249-255). Further steps then lead to the synthesis of uridine nucleotides from orotidylate. Cytidine nucleotides are derived from uridine-5′-triphosphate (UTP) by the amidation of UTP using glutamine as the amino donor and the enzyme CTP synthetase. Regulatory mutations in the human CTP synthetase are believed to confer multi-drug resistance to agents widely used in cancer therapy (Yamauchi, M. et al. (1990) EMBO J. 9:2095-2099).

[0062] Ligases forming carbon-carbon bonds include the carboxylases acetyl-CoA carboxylase and pyruvate carboxylase. Acetyl-CoA carboxylase catalyzes the carboxylation of acetyl-CoA from CO₂ and H₂O using the energy of ATP hydrolysis. Acetyl-CoA carboxylase is the rate-limiting step in the biogenesis of long-chain fatty acids. Two isoforms of acetyl-CoA carboxylase, types I and types II, are expressed in human in a tissue-specific manner (Ha, J. et al. (1994) Eur. J. Biochem. 219:297-306): Pyruvate carboxylase is a nuclear-encoded mitochondrial enzyme that catalyzes the conversion of pyruvate to oxaloacetate, a key intermediate in the citric acid cycle.

[0063] Ligases forming phosphoric ester bonds include the DNA ligases involved in both DNA replication and repair. DNA ligases seal phosphodiester bonds between two adjacent nucleotides in a DNA chain using the energy from ATP hydrolysis to first activate the free 5′-phosphate of one nucleotide and then react it with the 3′-OH group of the adjacent nucleotide. This resealing reaction is used in both DNA replication to join small DNA fragments called Okazaki fragments that are transiently formed in the process of replicating new DNA, and in DNA repair. DNA repair is the process by which accidental base changes, such as those produced by oxidative damage, hydrolytic attack, or uncontrolled methylation of DNA, are corrected before replication or transcription of the DNA can occur. Bloom's syndrome is an inherited human disease in which individuals are partially deficient in DNA ligation and consequently have an increased incidence of cancer (Alberts, B. et al. (1994) The Molecular Biology of the Cell, Garland Publishing Inc., New York N.Y., p. 247).

[0064] Molecules Associated with Growth and Development

[0065] Human growth and development requires the spatial and temporal regulation of cell differentiation, cell proliferation, and apoptosis. These processes coordinately control reproduction, aging, embryogenesis, morphogenesis, organogenesis, and tissue repair and maintenance. At the cellular level, growth and development is governed by the cell's decision to enter into or exit from the cell division cycle and by the cell's commitment to a terminally differentiated state. These decisions are made by the cell in response to extracellular signals and other environmental cues it receives. The following discussion focuses on the molecular mechanisms of cell division, reproduction, cell differentiation and proliferation, apoptosis, and aging.

[0066] Cell Division

[0067] Cell division is the fundamental process by which all living things grow and reproduce. In unicellular organisms such as yeast and bacteria, each cell division doubles the number of organisms, while in multicellular species many rounds of cell division are required to replace cells lost by wear or by programmed cell death, and for cell differentiation to produce a new tissue or organ Details of the cell division cycle may vary, but the basic process consists of three principle events. The first event, interphase, involves preparations for cell division, replication of the DNA, and production of essential proteins. In the second event, mitosis, the nuclear material is divided and separates to opposite sides of the cell. The final event, cytokinesis, is division and fission of the cell cytoplasm. The sequence and timing of cell cycle transitions is under the control of the cell cycle regulation system which controls the process by positive or negative regulatory circuits at various check points.

[0068] Regulated progression of the cell cycle depends on the integration of growth control pathways with the basic cell cycle machinery. Cell cycle regulators have been identified by selecting for human and yeast cDNAs that block or activate cell cycle arrest signals in the yeast mating pheromone pathway when they are overexpressed. Known regulators include human CPR (cell cycle progression restoration) genes, such as CPR8 and CPR2, and yeast CDC (cell division control) genes, including CDC91, that block the arrest signals. The CPR genes express a variety of proteins including cyclins, tumor suppressor binding proteins, chaperones, transcription factors, translation factors, and RNA-binding proteins (Edwards, M. C. et al.(1997) Genetics 147:1063-1076).

[0069] Several cell cycle transitions, including the entry and exit of a cell from mitosis, are dependent upon the activation and inhibition of cyclin-dependent kinases (Cdks). The Cdks are composed of a kinase subunit, Cdk, and an activating subunit, cyclin, in a complex that is subject to many levels of regulation. There appears to be a single Cdk in Saccharomyces cerevisiae and Saccharomyces pombe whereas mammals have a variety of specialized Cdks. Cyclins act by binding to and activating cyclin-dependent protein kinases which then phosphorylate and activate selected proteins involved in the mitotic process. The Cdk-cyclin complex is both positively and negatively regulated by phosphorylation, and by targeted degradation involving molecules such as CDC4 and CDC53. In addition, Cdks are further regulated by binding to inhibitors and other proteins such as Suc1 that modify their specificity or accessibility to regulators (Patra, D. and W. G. Dunphy (1996) Genes Dev. 10:1503-1515; and Mathias, N. et al. (1996) Mol. Cell Biol. 16:66346643).

[0070] Reproduction

[0071] The male and female reproductive systems are complex and involve many aspects of growth and development. The anatomy and physiology of the male and female reproductive systems are reviewed in (Guyton, A. C. (1991) Textbook of Medical Physiology, W. B. Saunders Co., Philadelphia Pa., pp. 899-928).

[0072] The male reproductive system includes the process of spermatogenesis, in which the sperm are formed, and male reproductive functions are regulated by various hormones and their effects on accessory sexual organs, cellular metabolism, growth, and other bodily functions.

[0073] Spermatogenesis begins at puberty as a result of stimulation by gonadotropic hormones released from the anterior pituitary. Immature sperm (spermatogonia) undergo several mitotic cell divisions before undergoing meiosis and full maturation. The testes secrete several male sex hormones, the most abundant being testosterone, that is essential for growth and division of the immature sperm, and for the masculine characteristics of the male body. Three other male sex hormones, gonadotropin-releasing hormone (GnRH), luteinizing hormone (LH), and follicle-stimulating hormone (FSH) control sexual function.

[0074] The uterus, ovaries, fallopian tubes, vagina, and breasts comprise the female reproductive system. The ovaries and uterus are the source of ova and the location of fetal development, respectively. The fallopian tubes and vagina are accessory organs attached to the top and bottom of the uterus, respectively. Both the uterus and ovaries have additional roles in the development and loss of reproductive capability during a female's lifetime. The primary role of the breasts is lactation Multiple endocrine signals from the ovaries, uterus, pituitary, hypothalamus, adrenal glands, and other tissues coordinate reproduction and lactation. These signals vary during the monthly menstruation cycle and during the female's lifetime. Similarly, the sensitivity of reproductive organs to these endocrine signals varies during the female's lifetime.

[0075] A combination of positive and negative feedback to the ovaries, pituitary and hypothalamus glands controls physiologic changes during the monthly ovulation and endometrial cycles. The anterior pituitary secretes two major gonadotropin hormones, follicle-stimulating hormone (FSH) and luteinizing hormone (LH), regulated by negative feedback of steroids, most notably by ovarian estradiol. If fertilization does not occur, estrogen and progesterone levels decrease. This sudden reduction of the ovarian hormones leads to menstruation, the desquamation of the endometrium.

[0076] Hormones further govern an the steps of pregnancy, parturition, lactation, and menopause. During pregnancy large quantities of human chorionic gonadotropin (hCG), estrogens, progesterone, and human chorionic somatomammotropin (hCS) are formed by the placenta. hCG, a glycoprotein similar to luteinizing hormone, stimulates the corpus luteum to continue producing more progesterone and estrogens, rather than to involute as occurs if the ovum is not fertilized hCS is similar to growth hormone and is crucial for fetal nutrition.

[0077] The female breast also matures during pregnancy. Large amounts of estrogen secreted by the placenta trigger growth and branching of the breast milk ductal system while lactation is initiated by the secretion of prolactin by the pituitary gland.

[0078] Parturition involves several hormonal changes that increase uterine contractility toward the end of pregnancy, as follows. The levels of estrogens increase more than those of progesterone. Oxytocin is secreted by the neurohypophysis. Concomitantly, uterine sensitivity to oxytocin increases. The fetus itself secretes oxytocin, cortisol (from adrenal glands), and prostaglandins.

[0079] Menopause occurs when most of the ovarian follicles have degenerated. The ovary then produces less estradiol, reducing the negative feedback on the pituitary and hypothalamus glands. Mean levels of circulating FSH and LH increase, even as ovulatory cycles continue. Therefore, the ovary is less responsive to gonadotropins, and there is an increase in the time between menstrual cycles.

[0080] Consequently, menstrual bleeding ceases and reproductive capability ends.

[0081] Cell Differentiation and Proliferation

[0082] Tissue growth involves complex and ordered patterns of cell proliferation, cell differentiation, and apoptosis. Cell proliferation must be regulated to maintain both the number of cells and their spatial organization. This regulation depends upon the appropriate expression of proteins which control cell cycle progression in response to extracellular signals, such as growth factors and other mitogens, and intracellular cues, such as DNA damage or nutrient starvation. Molecules which directly or indirectly modulate cell cycle progression fall into several categories, including growth factors and their receptors, second messenger and signal transduction proteins, oncogene products, tumor-suppressor proteins, and mitosis-promoting factors.

[0083] Growth factors were originally described as serum factors required to promote cell proliferation. Most growth factors are large, secreted polypeptides that act on cells in their local environment. Growth factors bind to and activate specific cell surface receptors and initiate intracellular signal transduction cascades. Many growth factor receptors are classified as receptor tyrosine kinases which undergo autophosphorylation upon ligand binding. Autophosphorylation enables the receptor to interact with signal transduction proteins characterized by the presence of SH2 or SH3 domains (Src homology regions 2 or 3). These proteins then modulate the activity state of small G-proteins, such as Ras, Rab, and Rho, along with GTPase activating proteins (GAPs), guanine nucleotide releasing proteins (GNRPs), and other guanine nucleotide exchange factors. Small G proteins act as molecular switches that activate other downstream events, such as mitogen-activated protein kinase (MAP kinase) cascades. MAP kinases ultimately activate transcription of mitosis-promoting genes.

[0084] In addition to growth factors, small signaling peptides and hormones also influence cell proliferation. These molecules bind primarily to another class of receptor, the trimeric G-protein coupled receptor (GPCR), found predominantly on the surface of immune, neuronal and neuroendocrine cells. Upon ligand binding, the GPCR activates a trimeric G protein which in turn triggers increased levels of intracellular second messengers such as phospholipase C, Ca2+, and cyclic AMP. Most GPCR-mediated signaling pathways indirectly promote cell proliferation by causing the secretion or breakdown of other signaling molecules that have direct mitogenic effects. These signaling cascades often involve activation of kinases and phosphatases. Some growth factors, such as some members of the transforming growth factor beta (TGF-β) family, act on some cells to stimulate cell proliferation and on other cells to inhibit it Growth factors may also stimulate a cell at one concentration and inhibit the same cell at another concentration. Most growth factors also have a multitude of other actions besides the regulation of cell growth and division: they can control the proliferation, survival, differentiation, migration, or function of cells depending on the circumstance. For example, the tumor necrosis factor/nerve growth factor (TNF/NGF) family can activate or inhibit cell death, as well as regulate proliferation and differentiation. The cell response depends on the type of cell, its stage of differentiation and transformation status, which surface receptors are stimulated, and the types of stimuli acting on the cell (Smith, A. et al. (1994) Cell 76:959-962; and Nocentini, G. et al. (1997) Proc. Natl. Acad. Sci. USA 94:6216-6221).

[0085] Neighboring cells in a tissue compete for growth factors, and when provided with “ited” quantities in a perfused system win grow to even higher cell densities before reaching density-dependent inhibition of cell division. Cells often demonstrate an anchorage dependence of cell division as well. This anchorage dependence may be associated with the formation of focal contacts linking the cytoskeleton with the extracellular matrix (ECM). The expression of ECM components can be stimulated by growth factors. For example, TGF-5 stimulates fibroblasts to produce a variety of ECM proteins, including fibronectin, collagen, and tenascin (Pearson, C. A. et al. (1988) EMBO J. 7:2677-2981). In fact, for some cell types specific ECM molecules, such as laminin or fibronectin, may act as growth factors. Tenascin-C and -R, expressed in developing and lesioned neural tissue, provide stimulatory/anti-adhesive or inhibitory properties, respectively, for axonal growth (Faissner, A (1997) Cell Tissue Res. 290:331-341).

[0086] Cancers are associated with the activation of oncogenes which are derived from normal cellular genes. These oncogenes encode oncoproteins which convert normal cells into malignant cells. Some oncoproteins are mutant isoforms of the normal protein, and other oncoproteins are abnormally expressed with respect to location or amount of expression The latter category of oncoprotein causes cancer by altering transcriptional control of cell proliferation. Five classes of oncoproteins are known to affect cell cycle controls. These classes include growth factors, growth factor receptors, intracellular signal transducers, nuclear transcription factors, and cell-cycle control proteins. Viral oncogenes are integrated into the human genome after infection of human cells by certain viruses. Examples of viral oncogenes include v-src, v-abl, and v-fps.

[0087] Many oncogenes have been identified and characterized These include v-src, erbA, erbB, her-2, mutated G_{S}, src, abl, ras, crk, jun, fos, myc, and mutated tumor-suppressor genes such as RB, p53, mdm2, Cip1, p16, and cyclin D. Transformation of normal genes to oncogenes may also occur by chromosomal translocation. The Philadelphia chromosome, characteristic of chronic myeloid leukemia and a subset of acute lymphoblastic leukemias, results from a reciprocal translocation between chromosomes 9 and 22 that moves a truncated portion of the proto-oncogene c-abl to the breakpoint cluster region (bcr) on chromosome 22.

[0088] Tumor-suppressor genes are involved in regulating cell proliferation. Mutations which cause reduced or loss of function in tumor-suppressor genes result in uncontrolled cell proliferation. For example, the retinoblastoma gene product (RB), in a non-phosphorylated state, binds several early-response genes and suppresses their transcription, thus blocking cell division. Phosphorylation of RB causes it to dissociate from the genes, releasing the suppression, and allowing cell division to proceed.

[0089] Apoptosis

[0090] Apoptosis is the genetically controlled process by which unneeded or defective cells undergo programmed cell death. Selective elimination of cells is as important for morphogenesis and tissue remodeling as is cell proliferation and differentiation. Lack of apoptosis may result in hyperplasia and other disorders associated with increased cell proliferation. Apoptosis is also a critical component of the immune response. Immune cells such as cytotoxic T-cells and natural killer cells prevent the spread of disease by inducing apoptosis in tumor cells and virus-infected cells. In addition, immune cells that fail to distinguish self molecules from foreign molecules must be eliminated by apoptosis to avoid an autoimmune response.

[0091] Apoptotic cells undergo distinct morphological changes. Hallmarks of apoptosis include cell shrinkage, nuclear and cytoplasmic condensation, and alterations in plasma membrane topology. Biochemically, apoptotic cells are characterized by increased intracellular calcium concentration, fragmentation of chromosomal DNA, and expression of novel cell surface components.

[0092] The molecular mechanisms of apoptosis are highly conserved, and many of the key protein regulators and effectors of apoptosis have been identified. Apoptosis generally proceeds in response to a signal which is transduced intracellularly and results in altered patterns of gene expression and protein activity. Signaling molecules such as hormones and cytokines are known both to stimulate and to inhibit apoptosis through interactions with cell surface receptors. Transcription factors also play an important role in the onset of apoptosis. A number of downstream effector molecules, particularly proteases such as the cysteine proteases called caspases, have been implicated in the degradation of cellular components and the proteolytic activation of other apoptotic effectors.

[0093] Aging and Senescence

[0094] Studies of the aging process or senescence have shown a member of characteristic cellular and molecular changes (Fauci et al. (1998) Harrison's Principles of Internal Medicine, McGraw-Hill, New York N.Y., p.37). These characteristics include increases in chromosome structural abnormalities, DNA cross-linking, incidence of single-stranded breaks in DNA, losses in DNA methylation, and degradation of telomere regions. In addition to these DNA changes, post-translational alterations of proteins increase including, deamidation, oxidation, cross-linking, and nonenzymatic glycation. Still further molecular changes occur in the mitochondria of aging cells through deterioration of structure. These changes eventually contribute to decreased function in every organ of the body.

[0095] Biochemical Pathway Molecules

[0096] Biochemical pathways are responsible for regulating metabolism, growth and development, protein secretion and trafficking, environmental responses, and ecological interactions including immune response and response to parasites.

[0097] DNA Replication

[0098] Deoxyribonucleic acid (DNA), the genetic material, is found in both the nucleus and mitochondria of human cells. The bulk of human DNA is nuclear, in the form of linear chromosomes, while mitochondrial DNA is circular. DNA replication begins at specific sites called origins of replication. Bidirectional synthesis occurs from the origin via two growing forks that move in opposite directions. Replication is semi-conservative, with each daughter duplex containing one old strand and its newly synthesized complementary partner. Proteins involved in DNA replication include DNA polymerases, DNA primase, telomerase, DNA helicase, topoisomerases, DNA ligases, replication factors, and DNA-binding proteins.

[0099] DNA Recombination and Repair

[0100] Cells are constantly faced with replication errors and environmental assault (such as ultraviolet irradiation) that can produce DNA damage. Damage to DNA consists of any change that modifies the structure of the molecule. Changes to DNA can be divided into two general classes, single base changes and structural distortions. Any damage to DNA can produce a mutation, and the mutation may produce a disorder, such as cancer.

[0101] Changes in DNA are recognized by repair systems within the cell. These repair systems act to correct the damage and thus prevent any deleterious affects of a mutational event Repair systems can be divided into three general types, direct repair, excision repair, and retrieval systems. Proteins involved in DNA repair include DNA polymerase, excision repair proteins, excision and cross link repair proteins, recombination and repair proteins, RAD51 proteins, and BLN and WRN proteins that are homologs of RecQ helicase. When the repair systems are eliminated, cells become exceedingly sensitive to environmental mutagens, such as ultraviolet irradiation Patients with disorders associated with a loss in DNA repair systems often exhibit a high sensitivity to environmental mutagens. Examples of such disorders include xeroderma pigmentosum (XP), Bloom's syndrome (BS), and Werner's syndrome (WS) (Yamagata, K et al. (1998) Proc. Natl. Acad. Sci. USA 95:8733-8738), ataxia telangiectasia, Cockayne's syndrome, and Fanconi's anemia.

[0102] Recombination is the process whereby new DNA sequences are generated by the movements of large pieces of DNA. In homologous recombination, which occurs during meiosis and DNA repair, parent DNA duplexes align at regions of sequence similarity, and new DNA molecules form by the breakage and joining of homologous segments. Proteins involved include RAD51 recombinase. In site-specific recombination, two specific but not necessarily homologous DNA sequences are exchanged. In the immune system this process generates a diverse collection of anitibody and T cell receptor genes. Proteins involved in site-specific recombination in the immune system include recombination activating genes 1 and 2 (RAG1 and RAG2). A defect in immune system site-specific recombination causes severe combined immunodeficiency disease in mice.

[0103] RNA Metabolism

[0104] Ribonucleic acid (RNA) is a linear single-stranded polymer of four nucleotides, ATP, CTP, UTP, and GTP. In most organisms, RNA is transcribed as a copy of DNA, the genetic material of the organism. In retroviruses RNA rather than DNA serves as the genetic material. RNA copies of the genetic material encode proteins or serve various structural, catalytic, or regulatory roles in organisms. RNA is classified according to its cellular localization and function Messenger RNAs (mRNAs) encode polypeptides. Ribosomal RNAs (rRNAs) are assembled, along with ribosomal proteins, into ribosomes, which are cytoplasmic particles that translate mRNA into polypeptides. Transfer RNAs (tRNAs) are cytosolic adaptor molecules that function in mRNA translation by recognizing both an mRNA codon and the amino acid that matches that codon. Heterogeneous nuclear RNAs (hnRNAs) include mRNA precursors and other nuclear RNAs of various sizes. Small nuclear RNAs (snRNAs) are a part of the nuclear spliceosome complex that removes intervening, non-coding sequences (introns) and rejoins exons in pre-mRNAs.

[0105] RNA Transcription

[0106] The transcription process synthesizes an RNA copy of DNA. Proteins involved include multi-subunit RNA polymerases, transcription factors IIA, IIB, IID, IIE, IIF, IIH, and IIJ. Many transcription factors incorporate DNA-binding structural motifs which comprise either α-helices or β-sheets that bind to the major groove of DNA. Four well-characterized structural motifs are helix-turn-helix, zinc finger, leucine zipper, and helix-loop-helix.

[0107] RNA Processing

[0108] Various proteins are necessary for processing of transcribed RNAs in the nucleus. Pre-mRNA processing steps include capping at the 5′ end with methylguanosine, polyadenylating the 3′ end, and splicing to remove introns. The spliceosomal complex is comprised of five small nuclear ribonucleoprotein particles (snRNPs) designated U1, U2, U4, U5, and U6. Each snRNP contains a single species of snRNA and about ten proteins. The RNA components of some snRNPs recognize and base-pair with intron consensus sequences. The protein components mediate spliceosome assembly and the splicing reaction. Autoantibodies to snRNP proteins are found in the blood of patients with systemic lupus erythematosus (Stryer, L. (1995) Biochemistry W. H. Freeman and Company, New York N.Y., p. 863).

[0109] Heterogeneous nuclear ribonucleoproteins (hnRNPs) have been identified that have roles in splicing, exporting of the mature RNAs to the cytoplasm, and mRNA translation (Biamonti, G. et al. (1998) Clin Exp. Rheumatol. 16:317-326). Some examples of hnRNPs include the yeast proteins Hrplp, involved in cleavage and polyadenylation at the 3′ end of the RNA; Cbp80p, involved in capping the 5′ end of the RNA; and Npl3p, a homolog of mammalian hnRNP A1, involved in export of mRNA from the nucleus (Shen, E. C. et al. (1998) Genes Dev. 12:679-691). HnRNPs have been shown to be important targets of the autoimmune response in rheumatic diseases (Biamonti, supra).

[0110] Many snRNP proteins, and alternative splicing factors are characterized by an RNA recognition motif (RRM). (Reviewed in Birney, E. et al. (1993) Nucleic Acids Res. 21:5803-5816.) The RRM is about 80 amino acids in length and forms four β-strands and two α-helices arranged in an a/0 sandwich. The RRM contains a core RNP-1 octapeptide motif along with surrounding conserved sequences.

[0111] RNA Stability and Degradation

[0112] RNA helicases alter and regulate RNA conformation and secondary structure by using energy derived from ATP hydrolysis to destabilize and unwind RNA duplexes. The most well-characterized and ubiquitous family of RNA helicases is the DEAD-box family, so named for the conserved B-type ATP-binding motif which is diagnostic of proteins in this family. Over 40 DEAD-box helicases have been identified in organisms as diverse as bacteria, insects, yeast, amphibians, mammals, and plants. DEAD-box helicases function in diverse processes such as translation initiation, splicing, ribosome assembly, and RNA editing, transport, and stability. Some DEAD-box helicases play tissue- and stage-specific roles in spermatogenesis and embryogenesis. (Reviewed in Linder, P. et al. (1989) Nature 337:121-122.)

[0113] Overexpression of the DEAD-box 1 protein (DDX1) may play a role in the progression of neuroblastoma (Nb) and retinoblastoma (Rb) tumors. Other DEAD-box helicases have been implicated either directly or indirectly in ultraviolet light-induced tumors, B cell lymphoma, and myeloid malignancies. (Reviewed in Godbout, R. et al. (1998) J. Biol. Chem. 273:21161-21168.)

[0114] Ribonucleases (RNases) catalyze the hydrolysis of phosphodiester bonds in RNA chains, thus cleaving the RNA. For example, RNase P is a ribonucleoprotein enzyme which cleaves the 5′ end of pre-tRNAs as part of their maturation process. RNase H digests the RNA strand of an RNA/DNA hybrid. Such hybrids occur in cells invaded by retroviruses, and RNase H is an important enzyme in the retroviral replication cycle. RNase H domains are often found as a domain associated with reverse transcriptases. RNase activity in serum and cell extracts is elevated in a variety of cancers and infectious diseases (Schein, C. H. (1997) Nat. Biotechnol. 15:529-536). Regulation of RNase activity is being investigated as a means to control tumor angiogenesis, allergic reactions, viral infection and replication, and fungal infections.

[0115] Protein Translation

[0116] The eukaryotic ribosome is composed of a 60S (large) subunit and a 40S (small) subunit, which together form the 80S ribosome. In addition to the 18S, 28S, 5S, and 5.8S rRNAs, the ribosome also contains more than fifty proteins. The ribosomal proteins have a prefix which denotes the subunit to which they belong, either L (large) or S (small). Three important sites are identified on the ribosome. The aminoacyl-tRNA site (A site) is where charged tRNAs (with the exception of the initiator-tRNA) bind on arrival at the ribosome. The peptidyl-tRNA site (P site) is where new peptide bonds are formed, as well as where the initiator tRNA binds. The exit site (E site) is where deacylated tRNAs bind prior to their release from the ribosome. (Translation is reviewed in Stryer, L. (1995) Biochemistry, W. H. Freeman and Company, New York N.Y., pp. 875-908; and Lodish, H. et al. (1995) Molecular Cell Biology, Scientific American Books, New York N.Y., pp. 119-138.)

[0117] tRNA Charging

[0118] Protein biosynthesis depends on each amino acid forming a linkage with the appropriate tRNA The aminoacyl-tRNA synthetases are responsible for the activation and correct attachment of an amino acid with its cognate tRNA The 20 aminoacyl-tRNA synthetase enzymes can be divided into two structural classes, Class I and Class II. Autoantibodies against aminoacyl-tRNAs are generated by patients with dermatomyositis and polymyositis, and correlate strongly with complicating interstitial lung disease (ILD). These antibodies appear to be generated in response to viral infection, and coxsackie virus has been used to induce experimental viral myositis in animals.

[0119] Translation Initiation

[0120] Initiation of translation can be divided into three stages. The first stage brings an initiator transfer RNA (Met-tRNA) together with the 40S ribosomal subunit to form the 43S preinitiation complex. The second stage binds the 43S preinitiation complex to the mRNA, followed by migration of the complex to the correct AUG initiation codon. The third stage brings the 60S ribosomal subunit to the 40S subunit to generate an 80S ribosome at the initiation codon. Regulation of translation primarily involves the first and second stage in the initiation process (Pain, V. M. (1996) Eur. J. Biochem. 236:747-771).

[0121] Several initiation factors, many of which contain multiple subunits, are involved in bringing an initiator tRNA and 40S ribosomal subunit together. eIF2, a guanine nucleotide binding protein, recruits the initiator tRNA to the 40S ribosomal subunit. Only when eIF2 is bound to GTP does it associate with the initiator tRNA eIF2B, a guanine nucleotide exchange protein, is responsible for converting eIF2 from the GDP-bound inactive form to the GTP-bound active form. Two other factors, eIF1A and eIF3 bind and stabilize the 40S subunit by interacting with 18S ribosomal RNA and specific ribosomal structural proteins. eIF3 is also involved in association of the 40S ribosomal subunit with mRNA. The Met-tRNA_{f}, eIF1A, eIF3, and 40S ribosomal subunit together make up the 43S preinitiation complex (Pain, supra).

[0122] Additional factors are required for binding of the 43S preinitiation complex to an mRNA molecule, and the process is regulated at several levels. eIF4F is a complex consisting of three proteins: eIF4E, eIF4A, and eIF4G. eIF4E recognizes and binds to the mRNA 5′-terminal m⁷GTP cap, eIF4A is a bidirectional RNA-dependent helicase, and eIF4G is a scaffolding polypeptide. eIF4G has three binding domains. The N-terminal third of eIF4G interacts with eIF4E, the central third interacts with eIF4A, and the C-terminal third interacts with eIF3 bound to the 43S preinitiation complex. Thus, eIF4G acts as a bridge between the 40S ribosomal subunit and the mRNA (Hentze, M. W. (1997) Science 275:500-501).

[0123] The ability of eIF4F to initiate binding of the 43S preinitiation complex is regulated by structural features of the mRNA The mRNA molecule has an untranslated region (UM) between the 5, cap and the AUG start codon. In some mRNAs this region forms secondary structures that impede binding of the 43S preinitiation complex. The helicase activity of eIF4A is thought to function in removing this secondary structure to facilitate binding of the 43S preinitiation complex (Pain, supra).

[0124] Translation Elongation

[0125] Elongation is the process whereby additional amino acids are joined to the initiator methionine to form the complete polypeptide chain. The elongation factors EF1α, EF1βγ, and EF2 are involved in elongating the polypeptide chain following initiation. EF1α is a GTP-binding protein. InEFla's GTP-bound form, it brings an aminoacyl-tRNA to the ribosome's A site. The amino acid attached to the newly arrived aminoacyl-tRNA forms a peptide bond with the initiator methionine. The GTP on EF1α is hydrolyzed to GDP, and EF1α-GDP dissociates from the ribosome. EF1βγ binds EF1α-GDP and induces the dissociation of GDP from EF1α, allowing EF1α to bind GTP and a new cycle to begun

[0126] As subsequent aminoacyl-tRNAs are brought to the ribosome, EF-G, another GTP-binding protein, catalyzes the translocation of tRNAs from the A site to he P site and finally to the E site of the ribosome. This allows the processivity of translation.

[0127] Translation Termination

[0128] The release factor eRF carries out termination of translation. eRF recognizes stop codons in the mRNA, leading to the release of the polypeptide chain from the ribosome.

[0129] Post-Translational Pathways

[0130] Proteins may be modified after translation by the addition of phosphate, sugar, prenyl, fatty acid, and other chemical groups. These modifications are often required for proper protein activity. Enzymes involved in post-translational modification include kinases, phosphatases, glycosyltransferases, and prenyltransferases. The conformation of proteins may also be modified after translation by the introduction and rearrangement of disulfide bonds (rearrangement catalyzed by protein disulfide isomerase), the isomerization of proline sidechains by prolyl isomerase, and by interactions with molecular chaperone proteins.

[0131] Proteins may also be cleaved by proteases. Such cleavage may result in activation, inactivation, or complete degradation of the protein. Proteases include serine proteases, cysteine proteases, aspartic proteases, and metalloproteases. Signal peptidase in the endoplasmic reticulum (ER) lumen cleaves the signal peptide from membrane or secretory proteins that are imported into the ER. Ubiquitin proteases are associated with the ubiquitin conjugation system (UCS), a major pathway for the degradation of cellular proteins in eukaryotic cells and some bacteria. The UCS mediates the elimination of abnormal proteins and regulates the half-lives of important regulatory proteins that control cellular processes such as gene transcription and cell cycle progression. In-the UCS pathway, proteins targeted for degradation are conjugated to a ubiquitin, a small heat stable protein. Proteins involved in the UCS include ubiquitin-activating enzyme, ubiquitin-conjugating enzymes, ubiquitin-ligases, and ubiquitin C-terminal hydrolases. The ubiquitinated protein is then recognized and degraded by the proteasome, a large, multisubunit proteolytic enzyme complex, and ubiquitin is released for reutilization by ubiquitin protease.

[0132] Lipid Metabolism

[0133] Lipids are water-insoluble, oily or greasy substances that are soluble in nonpolar solvents such as chloroform or ether. Neutral fats (triacylglycerols) serve as major fuels and energy stores. Polar lipids, such as phospholipids, sphingolipids, glycolipids, and cholesterol, are key structural components of cell membranes.

[0134] Lipid metabolism is involved in human diseases and disorders. In the arterial disease atherosclerosis, fatty lesions form on the inside of the arterial wall. These lesions promote the loss of arterial flexibility and the formation of blood clots (Guyton, A. C. Textbook of Medical Physiology (1991) W. B. Saunders Company, Philadelphia Pa., pp.760-763). In Tay-Sachs disease, the GM₂ ganglioside (a sphingolipid) accumulates in lysosomes of the central nervous system due to a lack of the enzyme N-acetylhexosaminidase. Patients suffer nervous system degeneration leading to early death (Fauci, AS. et al. (1998) Harrison's Principles of Internal Medicine McGraw-Hill, New York N.Y., p. 2171). The Niemann-Pick diseases are caused by defects in lipid metabolism. Niemann-Pick diseases types A and B are caused by accumulation of sphingomyelin (a sphingolipid) and other lipids in the central nervous system due to a defect in the enzyme sphingomyelinase, leading to neurodegeneration and lung disease. Niemann-Pick disease type C results from a defect in cholesterol transport, leading to the accumulation of sphingomyelin and cholesterol in lysosomes and a secondary reduction in sphingomyelinase activity. Neurological symptoms such as grand mal seizures, ataxia, and loss of previously learned speech, manifest 1-2 years after birth. A mutation in the NPC protein, which contains a putative cholesterol-sensing domain, was found in a mouse model of Niemann-Pick disease type C (Fauci, supra, p. 2175; Loftus, S. K et al. (1997) Science 277:232-235). (Lipid metabolism is reviewed in Stryer, L. (1995) Biochemistry, W. H. Freeman and Company, New York N.Y.; Lehninger, A (1982) Principles of Biochemistry Worth Publishers, Inc., New York N.Y.; and ExPASy “Biochemical Pathways” index of Boehringer Mannheim World Wide Web site.)

[0135] Fatty Acid Synthesis

[0136] Fatty acids are long-chain organic acids with a single carboxyl group and a long non-polar hydrocarbon tail. Long-chain fatty acids are essential components of glycolipids, phospholipids; and cholesterol, which are building blocks for biological membranes, and of triglycerides, which are biological fuel molecules. Long-chain fatty acids are also substrates for eicosanoid production, and are important in the functional modification of certain complex carbohydrates and proteins. 16-carbon and 18-carbon fatty acids are the most common.

[0137] Fatty acid synthesis occurs in the cytoplasm. In the first step, acetyl-Coenzyme A (CoA) carboxylase (ACC) synthesizes malonyl-CoA from acetyl-CoA and bicarbonate. The enzymes which catalyze the remaining reactions are covalently linked into a single polypeptide chain, referred to as the multifunctional enzyme fatty acid synthase (FAS). FAS catalyzes the synthesis of palmitate from acetyl-CoA and malonyl-CoA FAS contains acetyl transferase, malonyl transferase, β-ketoacetyl synthase, acyl carrier protein, β-ketoacyl reductase, dehydratase, enoyl reductase, and thioesterase activities. The final product of the FAS reaction is the 16 carbon fatty acid palmitate. Further elongation, as well as unsaturation, of palmitate by accessory enzymes of the ER produces the variety of long chain fatty acids required by the individual cell. These enzymes include a NADH-cytocbrome b₅ reductase, cytochrome b₅, and a desaturase.

[0138] Phospholipid and Triacylglcerol Synthesis

[0139] Triacylglycerols, also known as triglycerides and neutral fats, are major energy stores in animals. Triacylglycerols are esters of glycerol with three fatty acid chains. Glycerol-3-phosphate is produced from dihydroxyacetone phosphate by the enzyme glycerol phosphate dehydrogenase or from glycerol by glycerol kinase. Fatty acid-CoA's are produced from fatty acids by fatty acyl-CoA synthetases. Glyercol-3-phosphate is acylated with two fatty acyl-CoA's by the enzyme glycerol phosphate acyltransferase to give phosphatidate. Phosphatidate phosphatase converts phosphatidate to diacylglycerol, which is subsequently acylated to a triacylglyercol by the enzyme diglyceride acyltransferase. Phosphatidate phosphatase and diglyceride acyltransferase form a triacylglyerol synthease complex bound to the ER membrane.

[0140] A major class of phospholipids are the phosphoglycerides, which are composed of a glycerol backbone, two fatty acid chains, and a phosphorylated alcohol. Phosphoglycerides are components of cell membranes. Principal phosphoglycerides are phosphatidyl choline, phosphatidyl ethanolamine, phosphatidyl serine, phosphatidyl inositol, and diphosphatidyl glycerol. Many enzymes involved in phosphoglyceride synthesis are associated with membranes (Meyers, R. A. (1995) Molecular Biology and Biotechnology, VCH Publishers Inc., New York N.Y., pp. 494-501). Phosphatidate is converted to CDP-diacylglycerol by the enzyme phosphatidate cytidylyltransferase (ExPASy ENZYME EC 2.7.7.41). Transfer of the diacylglycerol group from CDP-diacylglycerol to serine to yield phosphatidyl serine, or to inositol to yield phosphatidyl inositol, is catalyzed by the enzymes CDP-diacylglycerol-serine O-phosphatidyltransferase and CDP-diacylglycerol-inositol 3-phosphatidyltransferase, respectively (ExPASy ENZYME EC 2.7.8.8; ExPASy ENZYME EC 2.7.8.11). The enzyme phosphatidyl serine decarboxylase catalyzes the conversion of phosphatidyl serine to phosphatidyl ethanolamine, using a pyruvate cofactor (Voelker, D. R. (1997) Biochim. Biophys. Acta 1348:236-244).

[0141] Phosphatidyl choline is formed using diet-derived choline by the reaction of CDP-choline with 1,2-diacylglycerol, catalyzed by diacylglycerol cholinephosphotransferase (ExPASy ENZYME 2.7.8.2).

[0142] Sterol, Steroid, and Isoprenoid Metabolism

[0143] Cholesterol, composed of four fused hydrocarbon rings with an alcohol at one end, moderates the fluidity of membranes in which it is incorporated. In addition, cholesterol is used in the synthesis of steroid hormones such as cortisol, progesterone, estrogen, and testosterone. Bile salts derived from cholesterol facilitate the digestion of lipids. Cholesterol in the skin forms a barrier that prevents excess water evaporation from the body. Farnesyl and geranylgeranyl groups, which are derived from cholesterol biosynthesis intermediates, are post-translationally added to signal transduction proteins such as ras and protein-targeting proteins such as rab. These modifications are important for the activities of these proteins (Guyton, supra; Stryer, supra, pp. 279-280, 691-702, 934).

[0144] Mammals obtain cholesterol derived from both de novo biosynthesis and the diet. The liver is the major site of cholesterol biosynthesis in mammals. Two acetyl-CoA molecules initially condense to form acetoacetyl-CoA, catalyzed by a thiolase. Acetoacetyl-CoA condenses with a third acetyl-CoA to form hydroxymethylglutaryl-CoA (HMG-CoA), catalyzed by HMG-CoA synthase. Conversion of HMG-COA to cholesterol is accomplished via a series of enzymatic steps known as the mevalonate pathway. The rate-limiting step is the conversion of HMG-CoA to mevalonate by HMG-CoA reductase. The drug lovastatin, a potent inhibitor of HMG-CoA reductase, is given to patients to reduce their serum cholesterol levels. Other mevalonate pathway enzymes include mevalonate kinase, phosphomevalonate kinase, diphosphomevalonate decarboxylase, isopentenyldiphosphate isomerase, dimethylallyl transferase, geranyl transferase, farnesyl-diphosphate farnesyltransferase, squalene monooxygenase, lanosterol synthase, lathosterol oxidase, and 7-dehydrocholesterol reductase.

[0145] Cholesterol is used in the synthesis of steroid hormones such as cortisol, progesterone, aldosterone, estrogen, and testosterone. First, cholesterol is converted to pregnenolone by cholesterol monooxygenases. The other steroid hormones are synthesized from pregnenolone by a series of enzyme-catalyzed reactions including oxidations, isomerizations, hydroxylations, reductions, and demethylations. Examples of these enzymes include steroid Δ-isomerase, 3β-hydroxy-Δ⁵-steroid dehydrogenase, steroid 21-monooxygenase, steroid 19-hydroxylase, and 3β-hydroxysteroid dehydrogenase. Cholesterol is also the precursor to vitamin D.

[0146] Numerous compounds contain 5-carbon isoprene units derived from the mevalonate pathway intermediate isopentenyl pyrophosphate. Isoprenoid groups are found in vitamin K, ubiquinone, retinal, dolichol phosphate (a carrier of oligosaccharides needed for N-lined glycosylation), and farnesyl and geranylgeranyl groups that modify proteins. Enzymes involved include farnesyl transferase, polyprenyl transferases, dolichyl phosphatase, and dolichyl kinase.

[0147] Sphingolipid Metabolism

[0148] Sphingolipids are an important class of membrane lipids that contain sphingosine, a long chain amino alcohol. They are composed of one long-chain fatty acid, one polar head alcohol, and sphingosine or sphingosine derivative. The three classes of sphingolipids are sphingomyelins, cerebrosides, and gangliosides. Sphingomyelins, which contain phosphocholine or phosphoethanolamine as their head group, are abundant in the myelin sheath surrounding nerve cells. Galactocerebrosides, which contain a glucose or galactose head group, are characteristic of the brain. Other cerebrosides are found in nonneural tissues. Gangliosides, whose head groups contain multiple sugar units, are abundant in the brain, but are also found in nonneural tissues.

[0149] Sphingolipids are built on a sphingosine backbone. Sphingosine is acylated to ceramide by the enzyme sphingosine acetyltransferase. Ceramide and phosphatidyl choline are converted to sphingomyelin by the enzyme ceramide choline phosphotransferase. Cerebrosides are synthesized by the linkage of glucose or galactose to ceramide by a transferase. Sequential addition of sugar residues to ceramide by transferase enzymes yields gangliosides.

[0150] Eicosanoid Metabolism

[0151] Eicosanoids, including prostaglandins, prostacyclin, thromboxanes, and leukotrienes, are 20-carbon molecules derived from fatty acids. Eicosanoids are signaling molecules which have roles in pain, fever, and inflammation. The precursor of all eicosanoids is arachidonate, which is generated from phospholipids by phospholipase A₂ and from diacylglycerols by diacylglycerol lipase. Leukotrienes are produced from arachidonate by the action of lipoxygenases. Prostaglandin synthase, reductases, and isomerases are responsible for the synthesis of the prostaglandins. Prostaglandins have roles in inflammation, blood flow, ion transport, synaptic transmission, and sleep. Prostacyclin and the thromboxanes are derived from a precursor prostaglandin by the action of prostacyclin synthase and thromboxane synthases, respectively.

[0152] Ketone Body Metabolism

[0153] Pairs of acetyl-CoA molecules derived from fatty acid oxidation in the liver can condense to form acetoacetyl-CoA, which subsequently forms acetoacetate, D-3-hydroxybutyrate, and acetone. These three products are known as ketone bodies. Enzymes involved in ketone body metabolism include HMG-COA synthetase, HMG-CoA cleavage enzyme, D-3-hydroxybutyrate dehydrogenase, acetoacetate decarboxylase, and 3-ketoacyl-CoA transferase. Ketone bodies are a normal fuel supply of the heart and renal cortex. Acetoacetate produced by the liver is transported to cells where the acetoacetate is converted back to acetyl-CoA and enters the citric acid cycle. In times of starvation, ketone bodies produced from stored triacylglyerols become an important fuel source, especially for the brain Abnormally high levels of ketone bodies are observed in diabetics. Diabetic coma can result if ketone body levels become too great

[0154] Lipid Mobilization

[0155] Within cells, fatty acids are transported by cytoplasmic fatty acid binding proteins (Online Mendelian Inheritance in Man (OMIM)*134650 Fatty Acid-Binding Protein 1, Liver; FABP1). Diazepam binding inhibitor (DBI), also known as endozepine and acyl CoA-binding protein, is an endogenous γ-aminobutyric acid (GABA) receptor ligand which is thought to down-regulate the effects of GABA DBI binds medium- and long-chain acyl-CoA esters with very high affinity and may function as an intracellular carrier of acyl-CoA esters (OMIM*125950 Diazepam Binding inhibitor; DBI; PROSITE PDOC00686 Acyl-CoA-binding protein signature).

[0156] Fat stored in liver and adipose triglycerides may be released by hydrolysis and transported in the blood Free fatty acids are transported in the blood by albumin Triacylglycerols and cholesterol esters in the blood are transported in lipoprotein particles. The particles consist of a core of hydrophobic lipids surrounded by a shell of polar lipids and apolipoproteins. The protein components serve in the solubilization of hydrophobic lipids and also contain cell-targeting signals. Lipoproteins include chylomicrons, chylomicron remnants, very-low-density lipoproteins (VLDL), intermediate-density lipoproteins (IDL), low-density lipoproteins (LDL), and high-density lipoproteins (DL). There is a strong inverse correlation between the levels of plasma HDL and risk of premature coronary heart disease.

[0157] Triacylglycerols in chylomicrons and VLDL are hydrolyzed by lipoprotein lipases that line blood vessels in muscle and other tissues that use fatty acids. Cell surface LDL receptors bind LDL particles which are then internalized by endocytosis. Absence of the LDL receptor, the cause of the disease familial hypercholesterolemia, leads to increased plasma cholesterol levels and ultimately to atherosclerosis. Plasma cholesteryl ester transfer protein mediates the transfer of cholesteryl esters from HDL to apolipoprotein B-containing lipoproteins. Cholesteryl ester transfer protein is important in the reverse cholesterol transport system and may play a role in atherosclerosis (Yamashita, S. et al. (1997) Curr. Opin. Lipidol. 8:101-110). Macrophage scavenger receptors, which bind and internalize modified lipoproteins, play a role in lipid transport and may contribute to atherosclerosis (Greaves, D. R. et al. (1998) Curr. Opin. Lipidol. 9:425-432).

[0158] Proteins involved in cholesterol uptake and biosynthesis are tightly regulated in response to cellular cholesterol levels. The sterol regulatory element binding protein (SREBP) is a sterol-responsive transcription factor. Under normal cholesterol conditions, SREBP resides in the ER membrane. When cholesterol levels are low, a regulated cleavage of SREBP occurs which releases the extracellular domain of the protein. This cleaved domain is then transported to the nucleus where it activates the transcription of the LDL receptor gene, and genes encoding enzymes of cholesterol synthesis, by binding the sterol regulatory element (SRE) upstream of the genes (Yang, J. et al. (1995) J. Biol. Chem. 270:12152-12161). Regulation of cholesterol uptake and biosynthesis also occurs via the oxysterol-binding protein (OSBP). OSBP is a high-affinity intracellular receptor for a variety of oxysterols that down-regulate cholesterol synthesis and stimulate cholesterol esterification (Lagace, T. A et al. (1997) Biochem. J. 326:205-213).

[0159] Beta-oxidation

[0160] Mitochondrial and peroxisomal beta-oxidation enzymes degrade saturated and unsaturated fatty acids by sequential removal of two-carbon units from CoA-activated fatty acids. The main beta-oxidation pathway degrades both saturated and unsaturated fatty acids while the auxiliary pathway performs additional steps required for the degradation of unsaturated fatty acids.

[0161] The pathways of mitochondrial and peroxisomal beta-oxidation use similar enzymes, but have different substrate specificities and functions. Mitochondria oxidize short-, medium-, and long-chain fatty acids to produce energy for cells. Mitochondrial beta-oxidation is a major energy source for cardiac and skeletal muscle. In liver, it provides ketone bodies to the peripheral circulation when glucose levels are low as in starvation, endurance exercise, and diabetes (Eaton, S. et al. (1996) Biochem. J. 320:345-357). Peroxisomes oxidize medium-, long-, and very-long-chain fatty acids, dicarboxylic fatty acids, branched fatty acids, prostaglandins, xenobiotics, and bile acid intermediates. The chief roles of peroxisomal beta-oxidation are to shorten toxic lipophilic carboxylic acids to facilitate their excretion and to shorten very-long-chain fatty acids prior to mitochondrial beta-oxidation (Mannaerts, G. P. and P. P. van Veldhoven (1993) Biochimie 75:147-158).

[0162] Enzymes involved in beta-oxidation include acyl CoA synthetase, carnitine acyltransferase, acyl CoA dehydrogenases, enoyl CoA hydratases, L-3-hydroxyacyl CoA dehydrogenase, β-ketothiolase, 2,4-dienoyl CoA reductase, and isomerase.

[0163] Lipid Cleavage and Degradation

[0164] Triglycerides are hydrolyzed to fatty acids and glycerol by lipases. Lysophospholipases (LPLs) are widely distributed enzymes that metabolize intracellular lipids, and occur in numerous isoforms. Small isoforms, approximately 15-30 kD, function as hydrolases; large isoforms, those exceeding 60 kD, function both as hydrolases and transacylases. A particular substrate for LPLS, lysophosphatidylcholine, causes lysis of cell membranes when it is formed or imported into a cell. LPLs are regulated by lipid factors including acylcarnitine, arachidonic acid, and phosphatidic acid. These lipid factors are signaling molecules important in numerous pathways, including the inflammatory response. (Anderson, R. et al. (1994) Toxicol. Appl. Pharmacol. 125:176-183; Selle, H. et al. (1993); Eur. J. Biochem. 212:411-416.)

[0165] The secretory phospholipase A₂ (PLA2) superfamily comprises a number of heterogeneous enzymes whose common feature is to hydrolyze the sn-2 fatty acid acyl ester bond of phosphoglycerides. Hydrolysis of the glycerophospholipids releases free fatty acids and lysophospholipids. PLA2 activity generates precursors for the biosynthesis of biologically active lipids, hydroxy fatty acids, and platelet-activating factor. PLA2 hydrolysis of the sn-2 ester bond in phospholipids generates free fatty acids, such as arachidonic acid and lysophospholipids.

[0166] Carbon and Carbohydrate Metabolism Carbohydrates, including sugars or saccharides, starch, and cellulose, are aldehyde or ketone compounds with multiple hydroxyl groups. The importance of carbohydrate metabolism is demonstrated by the sensitive regulatory system in place for maintenance of blood glucose levels. Two pancreatic hormones, insulin and glucagon, promote increased glucose uptake and storage by cells, and increased glucose release from cells, respectively. Carbohydrates have three important roles in mammalian cells. First, carbohydrates are used as energy stores, fuels, and metabolic intermediates. Carbohydrates are broken down to form energy in glycolysis and are stored as glycogen for later use. Second, the sugars deoxyribose and ribose form part of the structural support of DNA and RNA, respectively. Third, carbohydrate modifications are added to secreted and membrane proteins and lipids as they traverse the secretory pathway. Cell surface carbohydrate-containing macromolecules, including glycoproteins, glycolipids, and transmembrane proteoglycans, mediate adhesion with other cells and with components of the extracellular matrix. The extracellular matrix is comprised of diverse glycoproteins, glycosaminoglycans (GAGs), and carbohydrate-binding proteins which are secreted from the cell and assembled into an organized meshwork in close association with the cell surface. The interaction of the cell with the surrounding matrix profoundly influences cell shape, strength, flexibility, motility, and adhesion. These dynamic properties are intimately associated with signal transduction pathways controlling cell proliferation and differentiation, tissue construction, and embryonic development.

[0167] Carbohydrate metabolism is altered in several disorders including diabetes mellitus, hyperglycemia, hypoglycemia, galactosemia, galactokinase deficiency, and UDP-galactose4-epimerase deficiency (Fauci, A. S. et al. (1998) Harrison's Principles of Internal Medicine, McGraw-Hill New York N.Y., pp. 2208-2209). Altered carbohydrate metabolism is associated with cancer. Reduced GAG and proteoglycan expression is associated with human lung carcinomas (Nackaerts, K. et al. (1997) Int. J. Cancer 74:335-345). The carbohydrate determinants sialyl Lewis A and sialyl Lewis X are frequently expressed on human cancer cells (Kannagi, R. (1997) Glycoconj. J. 14:577-584). Alterations of the N-linked carbohydrate core structure of cell surface glycoproteins are linked to colon and pancreatic cancers (Schwarz, R. E. et al. (1996) Cancer Lett. 107:285-291). Reduced expression of the Sda blood group carbohydrate structure in cell surface glycolipids and glycoproteins is observed in gastrointestinal cancer (Dohi, T. et al. (1996) Int. J. Cancer 67:626-663). (Carbon and carbohydrate metabolism is reviewed in Stryer, L. (1995) Biochemistry W. H. Freeman and Company, New York N.Y.; Lehninger, A. L. (1982) Principles of Biochemistry Worth Publishers Inc., New York N.Y.; and Lodish, H. et al. (1995) Molecular Cell Biology Scientific American Books, New York N.Y.)

[0168] Glycolysis

[0169] Enzymes of the glycolytic pathway convert the sugar glucose to pyruvate while simultaneously producing ATP. The pathway also provides building blocks for the synthesis of cellular components such as long-chain fatty acids. After glycolysis, pyrvuate is converted to acetyl-Coenzyme A, which, in aerobic organisms, enters the citric acid cycle. Glycolytic enzymes include hexokinase, phosphoglucose isomerase, phosphofructokinase, aldolase, triose phosphate isomerase, glyceraldehyde 3-phosphate dehydrogenase, phosphoglycerate kinase, phosphoglyceromutase, enolase, and pyruvate kinase. Of these, phosphofructokinase, hexokinase, and pyruvate kinase are important in regulating the rate of glycolysis.

[0170] Gluconeogenesis

[0171] Gluconeogenesis is the synthesis of glucose from noncarbohydrate precursors such as lactate and amino acids. The pathway, which functions mainly in times of starvation and intense exercise, occurs mostly in the liver and kidney. Responsible enzymes include pyruvate carboxylase, phosphoenolpyruvate carboxykinase, fructose 1,6-bisphosphatase, and glucose-6-phosphatase.

[0172] Pentose Phosohate Pathway

[0173] Pentose phosphate pathway enzymes are responsible for generating the reducing agent NADPH, while at the same time oxidizing glucose-6-phosphate to ribose-5-phosphate. Ribose-5-phosphate and its derivatives become part of important biological molecules such as ATP, Coenzyme A, NAD⁺, FAD, RNA, and DNA The pentose phosphate pathway has both oxidative and non-oxidative branches. The oxidative branch steps, which are catalyzed by the enzymes glucose-6-phosphate dehydrogenase, lactonase, and 6-phosphogluconate dehydrogenase, convert glucose-6-phosphate and NADP⁺ to ribulose-6-phosphate and NADPH. The non-oxidative branch steps, which are catalyzed by the enzymes phosphopentose isomerase, phosphopentose epimerase, transketolase, and transaldolase, allow the interconversion of three-, four-, five-, six-, and seven-carbon sugars.

[0174] Glucouronate Metabolism

[0175] Glucuronate is a monosaccharide which, in the form of D-glucuronic acid, is found in the GAGs chondroitin and dermatan. D-glucuronic acid is also important in the detoxification and excretion of foreign organic compounds such as phenol. Enzymes involved in glucuronate metabolism include UDP-glucose dehydrogenase and glucuronate reductase.

[0176] Disaccharide Metabolism

[0177] Disaccharides must be hydrolyzed to monosaccharides to be digested. Lactose, a disaccharide found in mil, is hydrolyzed to galactose and glucose by the enzyme lactase. Maltose is derived from plant starch and is hydrolyzed to glucose by the enzyme maltase. Sucrose is derived from plants and is hydrolyzed to glucose and fructose by the enzyme sucrase. Trehalose, a disaccharide found mainly in insects and mushrooms, is hydrolyzed to glucose by the enzyme trehalase (OMIM*275360 Trehalase; Ruf, J. et al. (1990) J. Biol. Chem. 265:1503415039). Lactase, maltase, sucrase, and trehalase are bound to mucosal cells lining the small intestine, where they participate in the digestion of dietary disaccharides. The enzyme lactose synthetase, composed of the catalytic subunit galactosyltransferase and the modifier subunit α-lactalbumin, converts UDP-galactose and glucose to lactose in the mammary glands.

[0178] Glycogen, Starch, and Chitin Metabolism

[0179] Glycogen is the storage form of carbohydrates in mammals. Mobilization of glycogen maintains glucose levels between meals and during muscular activity. Glycogen is stored mainly in the liver and in skeletal muscle in the form of cytoplasmic granules. These granules contain enzymes that catalyze the synthesis and degradation of glycogen, as well as enzymes that regulate these processes. Enzymes that catalyze the degradation of glycogen include glycogen phosphorylase, a transferase, α-1,6-glucosidase, and phosphoglucomutase. Enzymes that catalyze the synthesis of glycogen include UDP-glucose pyrophosphorylase, glycogen synthetase, a branching enzyme, and nucleoside diphosphokinase. The enzymes of glycogen synthesis and degradation are tightly regulated by the hormones insulin, glucagon, and epinephrine. Starch, a plant-derived polysaccharide, is hydrolyzed to maltose, maltotriose, and α-dextrin by α-amylase, an enzyme secreted by the salivary glands and pancreas. Chitin is a polysaccharide found in insects and crustacea. A chitotriosidase is secreted by macrophages and may play a role in the degradation of chitin-containing pathogens (Boot, R. G. et al. (1995) J. Biol. Chem. 270:26252-26256).

[0180] Peptidoglycans and Glycosaminoglycans

[0181] Glycosaminoglycans (GAGs) are anionic linear unbranched polysaccharides composed of repetitive disaccharide units. These repetitive units contain a derivative of an amino sugar, either glucosamine or galactosamine. GAGs exist free or as part of proteoglycans, large molecules composed of a core protein attached to one or more GAGs. GAGs are found on the cell surface, inside cells, and in the extracellular matrix. Changes in GAG levels are associated with several autoimmune diseases including autoimmune thyroid disease, autoimmune diabetes mellitus, and systemic lupus erythematosus (Hansen, C. et al. (1996) Clin. Exp. Rheum 14 (Suppl. 15):S59-S67). GAGs include chondroitin sulfate, keratan sulfate, heparin, heparan sulfate, dermatan sulfate, and hyaluronan

[0182] The GAG hyaluronan (HA) is found in the extracellular matrix of many cells, especially in soft connective tissues, and is abundant in synovial fluid (Pitsillides, A. A. et al. (1993) Int. J. Exp. Pathol. 74:27-34). HA seems to play important roles in cell regulation, development, and differentiation (Laurent, T. C. and J. R. Fraser (1992) FASEB J. 6:2397-2404). Hyaluronidase is an enzyme that degrades HA to oligosaccharides. Hyaluronidases may function in cell adhesion, infection, angiogenesis, signal transduction, reproduction, cancer, and inflammation.

[0183] Proteoglycans, also known as peptidoglycans, are found in the extracellular matrix of connective tissues such as cartilage and are essential for distributing the load in weight-bearing joints. Cell-surface-attached proteoglycans anchor cells to the extracellular matrix. Both extracellular and cell-surface proteoglycans bind growth factors, facilitating their binding to cell-surface receptors and subsequent triggering of signal transduction pathways.

[0184] Amino Acid and Nitrogen Metabolism

[0185] NH₄⁺ is assimilated into amino acids by the actions of two enzymes, glutamate dehydrogenase and glutamine synthetase. The carbon skeletons of amino acids come from the intermediates of glycolysis, the pentose phosphate pathway, or the citric acid cycle. Of the twenty amino acids used in proteins, humans can synthesize only thirteen (nonessential amino acids). The remaining nine must come from the diet (essential amino acids). Enzymes involved in nonessential amino acid biosynthesis include glutamate kinase dehydrogenase, pyrroline carboxylate reductase, asparagine synthetase, phenylalanine oxygenase, methionine adenosyltransferase, adenosylhomocysteinase, cystathionine β-synthase, cystathionine γ-lyase, phosphoglycerate dehydrogenase, phosphoserine transaminase, phosphoserine phosphatase, serine hydroxylmethyltransferase, and glycine synthase.

[0186] Metabolism of amino acids takes place almost entirely in the liver, where the amino group is removed by aminotransferases (transaminases), for example, alanine aminotransferase. The amino group is transferred to α-ketoglutarate to form glutamate. Glutamate dehydrogenase converts glutamate to NH₄⁺ and α-ketoglutarate. NH₄⁺ is converted to urea by the urea cycle which is catalyzed by the enzymes arginase, ornithine transcarbamoylase, arginosuccinate synthetase, and arginosuccinase. Carbamoyl phosphate synthetase is also involved in urea formation. Enzymes involved in the metabolism of the carbon skeleton of amino acids include serine dehydratase, asparaginase, glutaminase, propionyl CoA carboxylase, methylmalonyl CoA mutase, branched-chain α-keto dehydrogenase complex, isovaleryl CoA dehydrogenase, β-methylcrotonyl CoA carboxylase, phenylalanine hydroxylase, p-hydroxylphenylpyruvate hydroxylase, and homogentisate oxidase.

[0187] Polyamines, which include spermidine, putrescine, and spermine, bind tightly to nucleic acids and are abundant in rapidly proliferating cells. Enzymes involved in polyamine synthesis include ornithine decarboxylase.

[0188] Diseases involved in amino acid and nitrogen metabolism include hyperammonemia, carbamoyl phosphate synthetase deficiency, urea cycle enzyme deficiencies, methylmalonic aciduria, maple syrup disease, alcaptonuria, and phenylketonuria.

[0189] Energy Metabolism

[0190] Cells derive energy from metabolism of ingested compounds that may be roughly categorized as carbohydrates, fats, or proteins. Energy is also stored in polymers such as triglycerides (fats) and glycogen (carbohydrates). Metabolism proceeds along separate reaction pathways connected by key intermediates such as acetyl coenzyme A (acetyl-CoA). Metabolic pathways feature anaerobic and aerobic degradation, coupled with the energy-requiring reactions such as phosphorylation of adenosine diphosphate (ADP) to the triphosphate (ATP) or analogous phosphorylations of guanosine (GDP/GTP), uridine (UDP/UTP), or cytidine (CDP/CTP). Subsequent dephosphorylation of the triphosphate drives reactions needed for cell maintenance, growth, and proliferation.

[0191] Digestive enzymes convert carbohydrates and sugars to glucose; fructose and galactose are converted in the liver to glucose. Enzymes involved in these conversions include galactose-1-phosphate uridyl transferase and UDP-galactose-4 epimerase. In the cytoplasm, glycolysis converts glucose to pyruvate in a series of reactions coupled to ATP synthesis.

[0192] Pyruvate is transported into the mitochondria and converted to acetyl-CoA for oxidation via the citric acid cycle, involving pyruvate dehydrogenase components, dihydrolipoyl transacetylase, and dihydrolipoyl dehydrogenase. Enzymes involved in the citric acid cycle include: citrate synthetase, aconitases, isocitrate dehydrogenase, alpha-ketoglutarate dehydrogenase complex including transsuccinylases, succinyl CoA synthetase, succinate dehydrogenase, fumarases, and malate dehydrogenase. Acetyl CoA is oxidized to CO₂ with concomitant formation of NADH, FADH₂, and GTP. In oxidative phosphorylation, the transport of electrons from NADH and FADH₂ to oxygen by dehydrogenases is coupled to the synthesis of ATP from ADP and Pᵢ by the F₀F₁ ATPase complex in the mitochondrial inner membrane. Enzyme complexes responsible for electron transport and ATP synthesis include the F₀F₁ ATPase complex, ubiquinone(CoQ)-cytochrome c reductase, ubiquinone reductase, cytochrome b, cytochrome c₁, FeS protein, and cytochrome c oxidase.

[0193] Triglycerides are hydrolyzed to fatty acids and glycerol by lipases. Glycerol is then is phosphorylated to glycerol-3-phosphate by glycerol kinase and glycerol phosphate dehydrogenase, and degraded by the glycolysis. Fatty acids are transported into the mitochondria as fatty acyl-carnitine esters and undergo oxidative degradation.

[0194] In addition to metabolic disorders such as diabetes and obesity, disorders of energy metabolism are associated with cancers (Dorward, A. et al. (1997) J. Bioenerg. Biomembr. 29:385-392), autism (Lombard, J. (1998) Med. Hypotheses 50:497-500), neurodegenerative disorders (Alexi, T. et al. (1998) Neuroreport 9:R57-64), and neuromuscular disorders (DiMauro, S. et al. (1998) Biochim. Biophys. Acta 1366:199-210). The myocardium is heavily dependent on oxidative metabolism, so metabolic dysfunction often leads to heart disease (DiMauro, S. and M. Hirano (1998) Curr. Opin. Cardiol. 13:190-197).

[0195] For a review of energy metabolism enzymes and intermediates, see Stryer, L. et al. (1995) Biochemistry, W. H. Freeman and Co., San Francisco Calif., pp.443-652. For a review of energy metabolism regulation, see Lodish, H. et al. (1995) Molecular Cell Biology, Scientific American Books, New York N.Y., pp. 744-770.

[0196] Cofactor Metabolism

[0197] Cofactors, including coenzymes and prosthetic groups, are small molecular weight inorganic or organic compounds that are required for the action of an enzyme. Many cofactors contain vitamins as a component. Cofactors include thiamine pyrophosphate, flavin adenine dinucleotide, flavin mononucleotide, nicotinamide adenine dinucleotide, pyridoxal phosphate, coenzyme A, tetrahydrofolate, lipoamide, and heme. The vitamins biotin and cobalamin are associated with enzymes as well. Heme, a prosthetic group found in myoglobin and hemoglobin, consists of protoporphyrin group bound to iron. Porphyrin groups contain four substituted pyrroles covalently joined in a ring, often with a bound metal atom. Enzymes involved in porphyrin synthesis include δ-aminolevulinate synthase, δ-aminolevulinate dehydrase, porphobilinogen deaminase, and cosynthase. Deficiencies in heme formation cause porphyrias. Heme is broken down as a part of erythrocyte turnover. Enzymes involved in heme degradation include heme oxygenase and biliverdin reductase.

[0198] Iron is a required cofactor for many enzymes. Besides the heme-containing enzymes, iron is found in iron-sulfur clusters in proteins including aconitase, succinate dehydrogenase, and NADH-Q reductase. Iron is transported in the blood by the protein transferrin Binding of transferrin to the transferrin receptor on cell surfaces allows uptake by receptor mediated endocytosis. Cytosolic iron is bound to ferritin protein.

[0199] A molybdenum-containing cofactor (molybdopterin) is found in enzymes including sulfite oxidase, xanthine dehydrogenase, and aldehyde oxidase. Molybdopterin biosynthesis is performed by two molybdenum cofactor synthesizing enzymes. Deficiencies in these enzymes cause mental retardation and lens dislocation. Other diseases caused by defects in cofactor metabolism include pernicious anemia and methylmalonic aciduria.

[0200] Secretion and Trafficking

[0201] Eukaryotic cells are bound by a lipid bilayer membrane and subdivided into functionally distinct, membrane bound compartments. The membranes maintain the essential differences between the cytosol, the extracelluar environment, and the lumenal space of each intracellular organelle. As lipid membranes are highly impermeable to most polar molecules, transport of essential nutrients, metabolic waste products, cell signaling molecules, macromolecules and proteins across lipid membranes and between organelles must be mediated by a variety of transport-associated molecules.

[0202] Protein Trafficking

[0203] In eukaryotes, some proteins are synthesized on ER-bound ribosomes, co-translationally imported into the ER, delivered from the ER to the Golgi complex for post-translational processing and sorting, and transported from the Golgi to specific intracellular and extracellular destinations. All cells possess a constitutive transport process which maintains homeostasis between the cell and its environment. In many differentiated cell types, the basic machinery is modified to carry out specific transport functions. For example, in endocrine glands, hormones and other secreted proteins are packaged into secretory granules for regulated exocytosis to the cell exterior. In macrophage, foreign extracellular material is engulfed (phagocytosis) and delivered to lysosomes for degradation. In fat and muscle cells, glucose transporters are stored in vesicles which fuse with the plasma membrane only in response to insulin stimulation.

[0204] The Secretory Pathway

[0205] Synthesis of most integral membrane proteins, secreted proteins, and proteins destined for the lumen of a particular organelle occurs on ER-bound ribosomes. These proteins are co-translationally imported into the ER. The proteins leave the ER via membrane-bound vesicles which bud off the ER at specific sites and fuse with each other (homotypic fusion) to form the ER-Golgi Intermediate Compartment (ERGIC). The ERGIC matures progressively through the cis, medial, and trans cisternal stacks of the Golgi, modifying the enzyme composition by retrograde transport of specific Golgi enzymes. In this way, proteins moving through the Golgi undergo post-translational modification, such as glycosylation. The final Golgi compartment is the Trans-Golgi Network (TGN), where both membrane and lumenal proteins are sorted for their final destination. Transport vesicles destined for intracellular compartments, such as the lysosome, bud off the TGN. What remains is a secretory vesicle which contains proteins destined for the plasma membrane, such as receptors, adhesion molecules, and ion channels, and secretory proteins, such as hormones, neurotransmitters, and digestive enzymes. Secretory vesicles eventually fuse with the plasma membrane (Glick, B. S. and V. Malhotra (1998) Cell 95:883-889).

[0206] The secretory process can be constitutive or regulated. Most cells have a constitutive pathway for secretion, whereby vesicles derived from maturation of the TGN require no specific signal to fuse with the plasma membrane. In many cells, such as endocrine cells, digestive cells, and neurons, vesicle pools derived from the TGN collect in the cytoplasm and do not fuse with the plasma membrane until they are directed to'by a specific signal.

[0207] Endocytosis

[0208] Endocytosis, wherein cells internalize material from the extracellular environment, is essential for transmission of neuronal, metabolic, and proliferative signals; uptake of many essential nutrients; and defense against invading organisms. Most cells exhibit two forms of endocytosis. The first, phagocytosis, is an actin-driven process exemplified in macrophage and neutrophils. Material to be endocytosed contacts numerous cell surface receptors which stimulate the plasma membrane to extend and surround the particle, enclosing it in a membrane-bound phagosome. In the mammalian immune system, IgG-coated particles bind Fc receptors on the surface of phagocytic leukocytes. Activation of the Fc receptors initiates a signal cascade involving src-family cytosolic kinases and the monomeric GTP-binding (G) protein Rho. The resulting actin reorganization leads to phagocytosis of the particle. This process is an important component of the humoral immune response, allowing the processing and presentation of bacterial-derived peptides to antigen-specific T-lymphocytes.

[0209] The second form of endocytosis, pinocytosis, is a more generalized uptake of material from the external milieu. Like phagocytosis, pinocytosis is activated by ligand binding to cell surface receptors. Activation of individual receptors stimulates an internal response that includes coalescence of the receptor-ligand complexes and formation of clathrin-coated pits. Invagination of the plasma membrane at clathrin-coated pits produces an endocytic vesicle within the cell cytoplasm. These vesicles undergo homotypic fusion to form an early endosomal (EE) compartment. The tubulovesicular EE serves as a sorting site for incoming material. ATP-driven proton pumps in the EE membrane lowers the pH of the EE lumen (pH 6.3-6.8). The acidic environment causes many ligands to dissociate from their receptors. The receptors, along with membrane and other integral membrane proteins, are recycled back to the plasma membrane by budding off the tubular extensions of the EE in recycling vesicles (RV). This selective removal of recycled components produces a carrier vesicle containing ligand and other material from the external environment. The carrier vesicle fuses with TGN-derived vesicles which contain hydrolytic enzymes. The acidic environment of the resulting late endosome (LE) activates the hydrolytic enzymes which degrade the ligands and other material. As digestion takes place, the LE fuses with the lysosome where digestion is completed (Mellman, I. (1996) Annu. Rev. Cell Dev. Biol. 12:575-625).

[0210] Recycling vesicles may return directly to the plasma membrane. Receptors internalized and returned directly to the plasma membrane have a turnover rate of 2-3 minutes. Some RVs undergo microtubule-directed relocation to a perinuclear site, from which they then return to the plasma membrane. Receptors following this route have a turnover rate of 5-10 minutes. Still other RVs are retained within the cell until an appropriate signal is received (Mellman, supra; and James, D. E. et al. (1994) Trends Cell Biol. 4:120-126).

[0211] Vesicle Formation

[0212] Several steps in the transit of material along the secretory and endocytic pathways require the formation of transport vesicles. Specifically, vesicles form at the transitional endoplasmic reticulum (tER), the rim of Golgi cisternae, the face of the Trans-Golgi Network (TGN), the plasma membrane (PM), and tubular extensions of the endosomes. The process begins with the budding of a vesicle out of the donor membrane. The membrane-bound vesicle contains proteins to be transported and is surrounded by a protective coat made up of protein subunits recruited from the cytosol. The initial budding and coating processes are controlled by a cytosolic ras-like GTP-binding protein, ADP-ribosylating factor (Arf), and adapter proteins (AP). Different isoforms of both Arf and AP are involved at different sites of budding. Another small G-protein, dynamin, forms a ring complex around the neck of the forming vesicle and may provide the mechanochemical force to accomplish the final step of the budding process. The coated vesicle complex is then transported through the cytosol. During the transport process, Arf-bound GTP is hydrolyzed to GDP and the coat dissociates from the transport vesicle (West, M. A. et al. (1997) J. Cell Biol. 138:1239-1254). Two different classes of coat protein have also been identified Clathrin coats form on the TGN and PM surfaces, whereas coatomer or COP coats form on the ER and Golgi. COP coats can further be distinguished as COPI, involved in retrograde traffic through the Golgi and from the Golgi to the ER, and COPII, involved in anterograde traffic from the ER to the Golgi (Mellman, supra). The COP coat consists of two major components, a G-protein (Arf or Sar) and coat protomer (coatomer). Coatomer is an equimolar complex of seven proteins, termed alpha-, beta-, beta'-, gamma-, delta-, epsilon- and zeta-COP. (Harter, C. and F. T. Wieland (1998) Proc. Natl. Acad. Sci. USA 95:11649-11654.)

[0213] Membrane Fusion

[0214] Transport vesicles undergo homotypic or heterotypic fusion in the secretory and endocytotic pathways. Molecules required for appropriate targeting and fusion of vesicles with their target membrane include proteins incorporated in the vesicle membrane, the target membrane, and proteins recruited from the cytosol. During budding of the vesicle from the donor compartment, an integral membrane protein, VAMP (vesicle-associated membrane protein) is incorporated into the vesicle. Soon after the vesicle uncoats, a cytosolic prenylated GTP-binding protein, Rab (a member of the Ras superfamily), is inserted into the vesicle membrane. GTP-bound Rab proteins are directed into nascent transport vesicles where they interact with VAMP. Following vesicle transport, GTPase activating proteins (GAPs) in the target membrane convert Rab proteins to the GDP-bound form A cytosolic protein, guanine-nucleotide dissociation inhibitor (GDI) helps return GDP-bound Rab proteins to their membrane of origin. Several Rab isoforms have been identified and appear to associate with specific compartments within the cell. Rab proteins appear to play a role in mediating the function of a viral gene, Rev, which is essential for replication of HIV-1, the virus responsible for AIDS (Flavell, R. A. et al. (1996) Proc. Natl. Acad. Sci. USA 93:4421-4424).

[0215] Docking of the transport vesicle with the target membrane involves the formation of a complex between the vesicle SNAP receptor (v-SNARE), target membrane (t-) SNAREs, and certain other membrane and cytosolic proteins. Many of these other proteins have been identified although their exact functions in the docking complex remain uncertain (Tellam, J. T. et al. (1995) J. Biol. Chem. 270:5857-5863; and Hata, Y. and T. C. Sudhof (1995) J. Biol. Chem. 270:13022-13028). N-ethylmaleimide sensitive factor (NSF) and soluble NSF-attachment protein (α-SNAP and, β-SNAP) are two such proteins that are conserved from yeast to man and function in most intracellular membrane fusion reactions. Sec1 represents a family of yeast proteins that function at many different stages in the secretory pathway including membrane fusion Recently, mammalian homologs of Sec1, called Munc-18 proteins, have been identified (Katagiri, H. et al. (1995) J. Biol. Chem 270:4963-4966; Hata et al. supra).

[0216] The SNARE complex involves three SNARE molecules, one in the vesicular membrane and two in the target membrane. Synaptotagmin is an integral membrane protein in the synaptic vesicle which associates with the t-SNARE syntaxin in the docking complex. Synaptotagmin binds calcium in a complex with negatively charged phospholipids, which allows the cytosolic SNAP protein to displace synaptotagmin from syntaxin and fusion to occur. Thus, synaptotagmin is a negative regulator of fusion in the neuron (Littleton, J. T. et al. (1993) Cell 74:1125-1134). The most abundant membrane protein of synaptic vesicles appears to be the glycoprotein synaptophysin, a 38 kDa protein with four transmembrane domains.

[0217] Specificity between a vesicle and its target is derived from the v-SNARE, t-SNAREs, and associated proteins involved. Different isoforms of SNAREs and Rabs show distinct cellular and subcellular distributions. VAMP-1/synaptobrevin, membrane-anchored synaptosome-associated protein of 25 kDa (SNAP-25), syntaxin-1, Rab3A, Rab15, and Rab23 are predominantly expressed in the brain and nervous system. Different syntaxin, VAMP, and Rab proteins are associated with distinct subcellular compartments and their vesicular carriers.

[0218] Nuclear Transport

[0219] Transport of proteins and RNA between the nucleus and the cytoplasm occurs through nuclear pore complexes (NPCs). NPC-mediated transport occurs in both directions through the nuclear envelope. All nuclear proteins are imported from the cytoplasm, their site of synthesis. tRNA and mRNA are exported from the nucleus, their site of synthesis, to the cytoplasm, their site of function. Processing of small nuclear RNAs involves export into the cytoplasm, assembly with proteins and modifications such as hypermethylation to produce small nuclear ribonuclear proteins (s RNs), and subsequent import of the snRNPs back into the nucleus. The assembly of ribosomes requires the initial import of ribosomal proteins from the cytoplasm, their incorporation with RNA into ribosomal subunits, and export back to the cytoplasm. (Görlich, D. and I. W. Mattaj (1996) Science 271:1513-1518.)

[0220] The transport of proteins and mRNAs across the NPC is selective, dependent on nuclear localization signals, and generally requires association with nuclear transport factors. Nuclear localization signals (NLS) consist of short stretches of amino acids enriched in basic residues. NLS are found on proteins that are targeted to the nucleus, such as the glucocorticoid receptor. The NLS is recognized by the NLS receptor, importin, which then interacts with the monomeric GTP-binding protein Ran. This NLS protein/receptor/Ran complex navigates the nuclear pore with the help of the homodimeric protein nuclear transport factor 2 (NTF2). NTF2 binds the GDP-bound form of Ran and to multiple proteins of the nuclear pore complex containing FXFG repeat motifs, such as p62. (Paschal, B. et al. (1997) J. Biol. Chem. 272:21534-21539; and Wong, D. H. et al. (1997) Mol. Cell Biol. 17:3755-3767). Some proteins are dissociated before nuclear mRNAs are transported across the NPC while others are dissociated shortly after nuclear mRNA transport across the NPC and are reimported into the nucleus.

[0221] Disease Correlation

[0222] The etiology of numerous human diseases and disorders can be attributed to defects in the transport or secretion of proteins. For example, abnormal hormonal secretion is linked to disorders such as diabetes insipidus (vasopressin), hyper- and hypoglycemia (insulin, glucagon), Grave's disease and goiter (thyroid hormone), and Cushing's and Addison's diseases (adrenocorticotropic hormone, ACTH). Moreover, cancer cells secrete excessive amounts of hormones or other biologically active peptides. Disorders related to excessive secretion of biologically active peptides by tumor cells include fasting hypoglycemia due to increased insulin secretion from insulinoma-islet cell tumors; hypertension due to increased epinephrine and norepinephrine secreted from pheochromocytomas of the adrenal medulla and sympathetic paraganglia; and carcinoid syndrome, which is characterized by abdominal cramps, diarrhea, and valvular heart disease caused by excessive amounts of vasoactive substances such as serotonin, bradykinin, histamine, prostaglandins, and polypeptide hormones, secreted from intestinal tumors. Biologically active peptides that are ectopically synthesized in and secreted from tumor cells include ACTH and vasopressin (lung and pancreatic cancers); parathyroid hormone (lung and bladder cancers); calcitonin (lung and breast cancers); and thyroid-stimulating hormone (medullary thyroid carcinoma). Such peptides may be useful as diagnostic markers for tumorigenesis(Schwartz, M. Z. (1997) Semin. Pediatr. Surg. 3:141-146; and Said, S. I. and G. R. Faloona (1975) N. Engl. J. Med. 293:155-160).

[0223] Defective nuclear transport may play a role in cancer. The BRCA1 protein contains three potential NLSs which interact with importin alpha, and is transported into the nucleus by the importin/NPC pathway. In breast cancer cells the BRCA1 protein is aberrantly localized in the cytoplasm. The mislocation of the BRCA1 protein in breast cancer cells may be due to a defect in the NPC nuclear import pathway (Chen, C. F. et al. (1996) J. Biol. Chem. 271:32863-32868).

[0224] It has been suggested that in some breast cancers, the tumor-suppressing activity of p53 is inactivated by the sequestration of the protein in the cytoplasm, away from its site of action in the cell nucleus. Cytoplasmic wild-type p53 was also found inhuman cervical carcinoma cell lines. (Moll, U. M. et al. (1992) Proc. Natl. Acad. Sci. USA 89:7262-7266; and Liang, X. H. et al. (1993) Oncogene 8:2645-2652.)

[0225] Environmental Responses

[0226] Organisms respond to the environment by a number of pathways. Heat shock proteins, including hsp 70, hsp60, hsp90, and hsp 40, assist organisms in coping with heat damage to cellular proteins.

[0227] Aquaporins (AQP) are channels that transport water and, in some cases, nonionic small solutes such as urea and glycerol. Water movement is important for a number of physiological processes including renal fluid filtration, aqueous humor generation in the eye, cerebrospinal fluid production in the brain, and appropriate hydration of the lung. Aquaporins are members of the major intrinsic protein (MIP) family of membrane transporters (King, L. S. and P. Agre (1996) Annu. Rev. Physiol. 58:619-648; Ishibashi, K. et al. (1997) J. Biol. Chem. 272:20782-20786). The study of aquaporins may have relevance to understanding edema formation and fluid balance in both normal physiology and disease states (King, supra). Mutations in AQP2 cause autosomal recessive nephrogenic diabetes insipidus (OMIM*107777 Aquaporin 2; AQP2). Reduced AQP4 expression in skletal muscle may be associated with Duchenne muscular dystrophy (Frigeri, A. et al. (1998) J. Clin. Invest. 102:695-703). Mutations in AQPO cause autosomal dominant cataracts in the mouse (OMIM *154050 Major Intrinsic Protein of Lens Fiber; MIP).

[0228] The metallothioneins (M Is) are a group of small (61 amino acids), cysteine-rich proteins that bind heavy metals such as cadmium, zinc, mercury, lead, and copper and are thought to play a role in metal detoxification or the metabolism and homeostasis of metals. Arsenite-resistance proteins have been identified in hamsters that are resistant to toxic levels of arsenite (Rossman, T. G. et al. (1997) Mutat. Res. 386:307-314).

[0229] Humans respond to light and odors by specific protein pathways. Proteins involved in light perception include rhodopsin, transducin, and cGMP phosphodiesterase. Proteins involved in odor perception include multiple olfactory receptors. Other proteins are important inhuman Circadian rhythms and responses to wounds.

[0230] Immunity and Host Defense

[0231] All vertebrates have developed sophisticated and complex immune systems that provide protection from viral, bacterial, fungal and parasitic infections. Included in these systems are the processes of humoral immunity, the complement cascade and the inflammatory response (Paul, W. E. (1993) Fundamental Immunology, Raven Press, Ltd., New York N.Y., pp.1-20).

[0232] The cellular components of the humoral immune system include six different types of leukocytes: monocytes, lymphocytes, polymorphonuclear granulocytes (consisting of neutrophils, eosinophils, and basophils) and plasma cells. Additionally, fragments of megakaryocytes, a seventh type of white blood cell in the bone marrow, occur in large numbers in the blood as platelets.

[0233] Leukocytes are formed from two stem cell lineages in bone marrow. The myeloid stem cell line produces granulocytes and monocytes and, the lymphoid stem cell produces lymphocytes. Lymphoid cells travel to the thymus, spleen and lymph nodes, where they mature and differentiate into lymphocytes. Leukocytes are responsible for defending the body against invading pathogens.

[0234] Neutrophils and monocytes attack invading bacteria, viruses, and other pathogens and destroy them by phagocytosis. Monocytes enter tissues and differentiate into macrophages which are extremely phagocytic. Lymphocytes and plasma cells are a part of the immune system which recognizes specific foreign molecules and organisms and inactivates them, as well as signals other cells to attack the invaders.

[0235] Granulocytes and monocytes are formed and stored in the bone marrow until needed. Megakaryocytes are produced in bone marrow, where they fragment into platelets and are released into the bloodstream. The main function of platelets is to activate the blood clotting mechanism. Lymphocytes and plasma cells are produced in various lymphogenous organs, including the lymph nodes, spleen, thymus, and tonsils.

[0236] Both neutrophils and macrophages exhibit chemotaxis towards sites of inflammation. Tissue inflammation in response to pathogen invasion results in production of chemo-attractants for leukocytes, such as endotoxins or other bacterial products, prostaglandins, and products of leukocytes or platelets.

[0237] Basophils participate in the release of the chemicals involved in the inflammatory process. The main function of basophils is secretion of these chemicals to such a degree that they have been referred to as “unicellular endocrine glands.” A distinct aspect of basophilic secretion is that the contents of granules go directly into the extracellular environment, not into vacuoles as occurs with neutrophils, eosinophils and monocytes. Basophils have receptors for the Fc fragment of immunoglobulin E (IgE) that are not present on other leukocytes. Crosslinking of membrane IgE with anti-IgE or other ligands triggers degranulation.

[0238] Eosinophils are bi- or multi-nucleated white blood cells which contain eosinophilic granules. Their plasma membrane is characterized by Ig receptors, particularly IgG and IgE. Generally, eosinophils are stored in the bone marrow until recruited for use at a site of inflammation or invasion. They have specific functions in parasitic infections and allergic reactions, and are thought to detoxify some of the substances released by mast cells and basophils which cause inflammation. Additionally, they phagocytize antigen-antibody complexes and further help prevent spread of the inflammation.

[0239] Macrophages are monocytes that have left the blood stream to settle in tissue. Once monocytes have migrated into tissues, they do not reenter the bloodstream. The mononuclear phagocyte system is comprised of precursor cells in the bone marrow, monocytes in circulation, and macrophages in tissues. The system is capable of very fast and extensive phagocytosis. A macrophage may phagocytize over 100 bacteria, digest them and extrude residues, and then survive for many more months. Macrophages are also capable of ingesting large particles, including red blood cells and malarial parasites. They increase several-fold in size and transform into macrophages that are characteristic of the tissue they have entered, surviving in tissues for several months.

[0240] Mononuclear phagocytes are essential in defending the body against invasion by foreign pathogens, particularly intracellular microorganisms such as M. tuberculosis, listeria, leishmania and toxoplasma. Macrophages can also control the growth of tumorous cells, via both phagocytosis and secretion of hydrolytic enzymes. Another important function of macrophages is that of processing antigen and presenting them in a biochemically modified form to lymphocytes.

[0241] The immune system responds to invading microorganisms in two major ways: antibody production and cell mediated responses. Antibodies are immunoglobulin proteins produced by B-lymphocytes which bind to specific antigens and cause inactivation or promote destruction of the antigen by other cells. Cell-mediated immune responses involve T-lymphocytes (T cells) that react with foreign antigen on the surface of infected host cells. Depending on the type of T cell, the infected cell is either killed or signals are secreted which activate macrophages and other cells to destroy the infected cell (Paul, supra).

[0242] T-lymphocytes originate in the bone marrow or liver in fetuses. Precursor cells migrate via the blood to the thymus, where they are processed to mature into T-lymphocytes. This processing is crucial because of positive and negative selection of T cells that will react with foreign antigen and not with self molecules. After processing, T cells continuously circulate in the blood and secondary lymphoid tissues, such as lymph nodes, spleen, certain epithelium-associated tissues in the gastrointestinal tract, respiratory tract and skin. When T-lymphocytes are presented with the complementary antigen, they are stimulated to proliferate and release large numbers of activated T cells into the lymph system and the blood system. These activated T cells can survive and circulate for several days. At the same time, T memory cells are created, which remain in the lymphoid tissue for months or years. Upon subsequent exposure to that specific antigen, these memory cells will respond more rapidly and with a stronger response than induced by the original antigen. This creates an “immunological memory” that can provide immunity for years.

[0243] There are two major types of T cells: cytotoxic T cells destroy infected host cells, and helper T cells activate other white blood cells via chemical signals. One class of helper cell, T_{H}1, activates macrophages to destroy ingested microorganisms, while another, T_{H}2, stimulates the production of antibodies by B cells.

[0244] Cytotoxic T cells directly attack the infected target cell. In virus-infected cells, peptides derived from viral proteins are generated by the proteasome. These peptides are transported into the ER by the transporter associated with antigen processing (TAP) (Pamer, E. and P. Cresswell (1998) Annu. Rev. Immunol. 16:323-358). Once inside the ER, the peptides bind MHC I chains, and the peptide/MHC I complex is transported to the cell surface. Receptors on the surface of T cells bind to antigen presented on cell surface MHC molecules. Once activated by binding to antigen, T cells secrete γ-interferon, a signal molecule that induces the expression of genes necessary for presenting viral (or other) antigens to cytotoxic T cells. Cytotoxic T cells kill the infected cell by stimulating programmed cell death.

[0245] Helper T cells constitute up to 75% of the total T cell population. They regulate the immune functions by producing a variety of lymphokines that act on other cells in the immune system and on bone marrow. Among these lymphokines are: interleukins-2,3,4,5,6; granulocyte-monocyte colony stimulating factor, and γ-interferon.

[0246] Helper T cells are required for most B cells to respond to antigen. When an activated helper cell contacts a B cell its centrosome and Golgi apparatus become oriented toward the B cell, aiding the directing of signal molecules, such as transmembrane-bound protein called CD40 ligand, onto the B cell surface to interact with the CD40 transmembrane protein Secreted signals also help B cells to proliferate and mature and, in some cases, to switch the class of antibody being produced.

[0247] B-lymphocytes (B cells) produce antibodies which react with specific antigenic proteins presented by pathogens. Once activated, B cells become filled with extensive rough endoplasmic reticulum and are known as plasma cells. As with T cells, interaction of B cells with antigen stimulates proliferation of only those B cells which produce antibody specific to that antigen. There are five classes of antibodies, known as immunoglobulins, which together comprise about 20% of total plasma protein. Each class mediates a characteristic biological response after antigen binding. Upon activation by specific antigen B cells switch from making membrane-bound antibody to secretion of that antibody.

[0248] Antibodies, or immunoglobulins (g), are the founding members of the Ig superfamily and the central components of the humoral immune response. Antibodies are either expressed on the surface of B cells or secreted by B cells into the circulation. Antibodies bind and neutralize blood-borne foreign antigens. The prototypical antibody is a tetramer consisting of two identical heavy polypeptide chains (H-chains) and two identical light polypeptide chains (L-chains) interlinked by disulfide bonds. This arrangement confers the characteristic Y-shape to antibody molecules. Antibodies are classified based on their H-chain composition. The five antibody classes, IgA, IgD, IgE, IgG and IgM, are defined by the α, δ, ε, γ, and μ H-chain types. There are two types of L-chains, κ and λ, either of which may associate as a pair with any H-chain pair. IgG, the most common class of antibody found in the circulation, is tetrameric, while the other classes of antibodies are generally variants or multimers of this basic structure.

[0249] H-chains and L-chains each contain an N-terminal variable region and a C-terminal constant region. Both H-chains and L-chains contain repeated Ig domains. For example, a typical H-chain contains four Ig domains, three of which occur within the constant region and one of which occurs within the variable region and contributes to the formation of the antigen recognition site. Likewise, a typical L-chain contains two Ig domains, one of which occurs within the constant region and one of which occurs within the variable region. In addition, H chains such as μ have been shown to associate with other polypeptides during differentiation of the B cell.

[0250] Antibodies can be described in terms of their two main functional domains. Antigen recognition is mediated by the Fab (antigen binding fragment) region of the antibody, while effector functions are mediated by the Fc (crystallizable fragment) region. Binding of antibody to an antigen, such as a bacterium, triggers the destruction of the antigen by phagocytic white blood cells such as macrophages and neutrophils. These cells express surface receptors that specifically bind to the antibody Fc region and allow the phagocytic cells to engulf, ingest, and degrade the antibody-bound antigen. The Fc receptors expressed by phagocytic cells are single-pass transmembrane glycoproteins of about 300 to 400 amino acids (Sears, D. W. et al. (1990) J. Immunol. 144:371-378). The extracellular portion of the Fc receptor typically contains two or three Ig domains.

[0251] Diseases which cause over- or under-abundance of any one type of leukocyte usually result in the entire immune defense system becoming involved. A well-known autoimmune disease is AIDS (Acquired Immunodeficiency Syndrome) where the number of helper T cells is depleted, leaving the patient susceptible to infection by microorganisms and parasites. Another widespread medical condition attributable to the immune system is that of allergic reactions to certain antigens. Allergic reactions include: hay fever, asthma, anaphylaxis, and urticaria (hives). Leukemias are an excess production of white blood cells, to the point where a major portion of the body's metabolic resources are directed solely at proliferation of white blood cells, leaving other tissues to starve. Leukopenia or agranulocytosis occurs when the bone marrow stops producing white blood cells. This leaves the body unprotected against foreign microorganisms, including those which normally inhabit skin, mucous membranes, and gastrointestinal tract. If all white blood cell production stops completely, infection will occur within two days and death may follow only 1 to 4 days later.

[0252] Impaired phagocytosis occurs in several diseases, including monocytic leukemia, systemic lupus, and granulomatous disease. In such a situation, macrophages can phagocytize normally, but the enveloped organism is not killed. A defect in the plasma membrane enzyme which converts oxygen to lethally reactive forms results in abscess formation in liver, lungs, spleen, lymph nodes, and beneath the skin. Eosinophilia is an excess of eosinophils commonly observed in patients with allergies (hay fever, asthma), allergic reactions to drugs, rheumatoid arthritis, and cancers (Hodgkin's disease, lung, and liver cancer) (Isselbacher, K. J. et al. (1994) Harrison's Principles of Internal Medicine, McGraw-Hill, Inc., New York N.Y.).

[0253] Host defense is further augmented by the complement system. The complement system serves as an effector system and is involved in infectious agent recognition. It can function as an independent immune network or in conjunction with other humoral immune responses. The complement system is comprised of numerous plasma and membrane proteins that act in a cascade of reaction sequences whereby one component activates the next. The result is a rapid and amplified response to infection through either an inflammatory response or increased phagocytosis.

[0254] The complement system has more than 30 protein components which can be divided into functional groupings including modified serine proteases, membrane-binding proteins and regulators of complement activation. Activation occurs through two different pathways the classical and the alternative. Both pathways serve to destroy infectious agents through distinct triggering mechanisms that eventually merge with the involvement of the component C3.

[0255] The classical pathway requires antibody binding to infectious agent antigens. The antibodies serve to define the target and initiate the complement system cascade, culminating in the destruction of the infectious agent. In this pathway, since the antibody guides initiation of the process, the complement can be seen as an effector arm of the humoral immune system.

[0256] The alternative pathway of the complement system does not require the presence of pre-existing antibodies for targeting infectious agent destruction. Rather, this pathway, through low levels of an activated component, remains constantly primed and provides surveillance in the non-immune host to enable targeting and destruction of infectious agents. In this case foreign material triggers the cascade, thereby facilitating phagocytosis or lysis (Paul, supra, pp.918-919).

[0257] Another important component of host defense is the process of inflammation. Inflammatory responses are divided into four categories on the basis of pathology and include allergic inflammation, cytotoxic antibody mediated inflammation, immune complex mediated inflammation and monocyte mediated inflammation. Inflammation manifests as a combination of each of these forms with one predominating.

[0258] Allergic acute inflammation is observed in individuals wherein specific antigens stimulate IgE antibody production. Mast cells and basophils are subsequently activated by the attachment of antigen-IgE complexes, resulting in the release of cytoplasmic granule contents such as histamine. The products of activated mast cells can increase vascular permeability and constrict the smooth muscle of breathing passages, resulting in anaphylaxis or asthma. Acute inflammation is also mediated by cytotoxic antibodies and can result in the destruction of tissue through the binding of complement-fixing antibodies to cells. The responsible antibodies are of the IgG or IgM types. Resultant clinical disorders include autoimmune hemolytic anemia and thrombocytopenia as associated with systemic lupus erythematosis.

[0259] Immune complex mediated acute inflammation involves the IgG or IgM antibody types which combine with antigen to activate the complement cascade. When such immune complexes bind to neutrophils and macrophages they activate the respiratory burst to form protein- and vessel-damaging agents such as hydrogen peroxide, hydroxyl radical, hypochlorous acid, and chloramines. Clinical manifestations include rheumatoid arthritis and systemic lupus erythematosus.

[0260] In chronic inflammation or delayed-type hypersensitivity, macrophages are activated and process antigen for presentation to T cells that subsequently produce lymphokines and monokines. This type of inflammatory response is likely important for defense against intracellular parasites and certain viruses. Clinical associations include, granulomatous disease, tuberculosis, leprosy, and sarcoidosis (Paul, W. E., supra, pp.1017-1018).

[0261] Extracellular Information Transmission Molecules

[0262] Intercellular communication is essential for the growth and survival of multicellular organisms, and in particular, for the function of the endocrine, nervous, and immune systems. In addition, intercellular communication is critical for developmental processes such as tissue construction and organogenesis, in which cell proliferation, cell differentiation, and morphogenesis must be spatially and temporally regulated in a precise and coordinated manner. Cells communicate with one another through the secretion and uptake of diverse types of signaling molecules such as hormones, growth factors, neuropeptides, and cytokines.

[0263] Hormones

[0264] Hormones are signaling molecules that coordinately regulate basic physiological processes from embryogenesis throughout adulthood. These processes include metabolism, respiration, reproduction, excretion, fetal tissue differentiation and organogenesis, growth and development, homeostasis, and the stress response. Hormonal secretions and the nervous system are tightly integrated and interdependent. Hormones are secreted by endocrine glands, primarily the hypothalamus and pituitary, the thyroid and parathyroid, the pancreas, the adrenal glands, and the ovaries and testes.

[0265] The secretion of hormones into the circulation is tightly controlled Hormones are often secreted in diurnal, pulsatile, and cyclic patterns. Hormone secretion is regulated by perturbations in blood biochemistry, by other upstream-acting hormones, by neural impulses, and by negative feedback loops. Blood hormone concentrations are constantly monitored and adjusted to maintain opal, steady-state levels. Once secreted, hormones act only on those target cells that express specific receptors.

[0266] Most disorders of the endocrine system are caused by either hyposecretion or hypersecretion of hormones. Hyposecretion often occurs when a hormone's gland of origin is damaged or otherwise impaired. Hypersecretion often results from the proliferation of tumors derived from hormone-secreting cells. Inappropriate hormone levels may also be caused by defects in regulatory feedback loops or in the processing of hormone precursors. Endocrine malfunction may also occur when the target cell falls to respond to the hormone.

[0267] Hormones can be classified biochemically as polypeptides, steroids, eicosanoids, or amines. Polypeptides, which include diverse hormones such as insulin and growth hormone, vary in size and function and are often synthesized as inactive precursors that are processed intracellularly into mature, active forms. Amines, which include epinephrine and dopamine, are ammo acid derivatives that function in neuroendocrine signaling. Steroids, which include the cholesterol-derived hormones estrogen and testosterone, function in sexual development and reproduction. Eicosanoids, which include prostaglandins and prostacyclins, are fatty acid derivatives that function in a variety of processes. Most polypeptides and some amines are soluble in the circulation where they are highly susceptible to proteolytic degradation within seconds after their secretion. Steroids and lipids are insoluble and must be transported in the circulation by carrier proteins. The following discussion will focus primarily on polypeptide hormones.

[0268] Hormones secreted by the hypothalamus and pituitary gland play a critical role in endocrine function by coordinately regulating hormonal secretions from other endocrine glands in response to neural signals. Hypothalamic hormones include thyrotropin-releasing hormone, gonadotropin-releasing hormone, somatostatin, growth-hormone releasing factor, corticotropin-releasing hormone, substance P, dopamine, and prolactin-releasing hormone. These hormones directly regulate the secretion of hormones from the anterior lobe of the pituitary. Hormones secreted by the anterior pituitary include adrenocorticotropic hormone (ACTH), melanocyte-stimulating hormone, somatotropic hormones such as growth hormone and prolactin, glycoprotein hormones such as thyroid-stimulating hormone, luteinizing hormone (LH), and follicle-stimulating hormone (FSH), β-lipotropin, and β-endorphins. These hormones regulate hormonal secretions from the thyroid, pancreas, and adrenal glands, and act directly on the reproductive organs to slate ovulation and spermatogenesis. The posterior pituitary synthesizes and secretes antidiuretic hormone (ADH, vasopressin) and oxytocin.

[0269] Disorders of the hypothalamus and pituitary often result from lesions such as primary brain tumors, adenomas, infarction associated with pregnancy, hypophysectomy, aneurysms, vascular malformations, thrombosis, infections, immunological disorders, and complications due to head trauma. Such disorders have profound effects on the function of other endocrine glands. Disorders associated with hypopituitarism include hypogonadism, Sheehan syndrome, diabetes insipidus, Kallian's disease, Hand-Schuller-Christian disease, Letterer-Siwe disease, sarcoidosis, empty sella syndrome, and dwarfism Disorders associated with hyperpituitarism include acromegaly, giantism, and syndrome of inappropriate ADH secretion (SIADH), often caused by benign adenomas.

[0270] Hormones secreted by the thyroid and parathyroid primarily control metabolic rates and the regulation of serum calcium levels, respectively. Thyroid hormones include calcitonin, somatostatin, and thyroid hormone. The parathyroid secretes parathyroid hormone. Disorders associated with hypothyroidism include goiter, myxedema, acute thyroiditis associated with bacterial infection, subacute thyroiditis associated with viral infection, autoimmune thyroiditis (Hashimoto's disease), and cretinism Disorders associated with hyperthyroidism include thyrotoxicosis and its various forms, Grave's disease, pretibial myxedema, toxic multinodular goiter, thyroid carcinoma, and Plummer's disease. Disorders associated with hyperparathyroidism include Conn disease (chronic hypercalemia) leading to bone resorption and parathyroid hyperplasia.

[0271] Hormones secreted by the pancreas regulate blood glucose levels by modulating the rates of carbohydrate, fat, and protein metabolism. Pancreatic hormones include insulin, glucagon, amylin, γ-aminobutyric acid, gastrin, somatostatin, and pancreatic polypeptide. The principal disorder associated with pancreatic dysfunction is diabetes mellitus caused by insufficient insulin activity. Diabetes mellitus is generally classified as either Type I (insulin-dependent, juvenile diabetes) or Type II (non-insulin-dependent, adult diabetes). The treatment of both forms by insulin replacement therapy is well known. Diabetes mellitus often leads to acute complications such as hypoglycemia (insulin shock), coma, diabetic ketoacidosis, lactic acidosis, and chronic complications leading to disorders of the eye, kidney, skin, bone, joint, cardiovascular system, nervous system, and to decreased resistance to infection.

[0272] The anatomy, physiology, and diseases related to hormonal function are reviewed in McCance, K. L. and S. E. Huether (1994) Pathophysiology: The Biological Basis for Disease in Adults and Children, Mosby-Year Book, Inc., St Louis Mo.; Greenspan, F. S. and J. D. Baxter (1994) Basic and Clinical Endocrinology, Appleton and Lange, East Norwalk Conn.

[0273] Growth Factors

[0274] Growth factors are secreted proteins that mediate intercellular communication. Unlike hormones, which travel great distances via the circulatory system, most growth factors are primarily local mediators that act on neighboring cells. Most growth factors contain a hydrophobic N-terminal signal peptide sequence which directs the growth factor into the secretory pathway. Most growth factors also undergo post-translational modifications within the secretory pathway. These modifications can include proteolysis, glycosylation, phosphorylation, and intramolecular disulfide bond formation. Once secreted, growth factors bind to specific receptors on the surfaces of neighboring target cells, and the bound receptors trigger intracellular signal transduction pathways. These signal transduction pathways elicit specific cellular responses in the target cells. These responses can include the modulation of gene expression and the stimulation or inhibition of cell division, cell differentiation, and cell motility.

[0275] Growth factors fan into at least two broad and overlapping classes. The broadest class includes the large polypeptide growth factors, which are wide-ranging in their effects. These factors include epidermal growth factor (EGF), fibroblast growth factor (FGF), transforming growth factors (TGF-β), insulin-like growth factor (IGF), nerve growth factor (NGF), and platelet-derived growth factor (PDGF), each defining a family of numerous related factors. The large polypeptide growth factors, with the exception of NGF, act as mitogens on diverse cell types to stimulate wound healing, bone synthesis and remodeling, extracellular matrix synthesis, and proliferation of epithelial, epidermal, and connective tissues. Members of the TGF-β, EGF, and FGF families also function as inductive signals in the differentiation of embryonic tissue. NGF functions specifically as a neurotrophic factor, promoting neuronal growth and differentiation.

[0276] Another class of growth factors includes the hematopoietic growth factors, which are narrow in their target specificity. These factors stimulate the proliferation and differentiation of blood cells such as B-lymphocytes, T-lymphocytes, erythrocytes, platelets, eosinophils, basophils, neutrophils, macrophages, and their stem cell precursors. These factors include the colony-stimulating factors (G-CSF, M-CSF, GM-CSF, and CSF1-3), erythropoietin, and the cytokines. The cytokines are specialized hematopoietic factors secreted by cells of the immune system and are discussed in detail below.

[0277] Growth factors play critical roles in neoplastic transformation of cells in vitro and in tumor progression in vivo. Overexpression of the large polypeptide growth factors promotes the proliferation and transformation of cells in culture. Inappropriate expression of these growth factors by tumor cells in vivo may contribute to tumor vascularization and metastasis. Inappropriate activity of hematopoietic growth factors can result in anemias, leukemias, and lymphomas. Moreover, growth factors are both structurally and functionally related to oncoproteins, the potentially cancer-causing products of proto-oncogenes. Certain FGF and PDGF family members are themselves homologous to oncoproteins, whereas receptors for some members of the EGF, NGF, and FGF families are encoded by proto-oncogenes. Growth factors also affect the transcriptional regulation of both proto-oncogenes and oncosuppressor genes (Pimentel, E. (1994) Handbook of Growth Factors, CRC Press, Ann Arbor Mich.; McKay, I. and I. Leigh, eds. (1993) Growth Factors: A Practical Approach, Oxford University Press, New York N.Y.; Habenicht, A, ed. (1990) Growth Factors. Differentiation Factor, and Cytokines, Springer-Verlag, New York N.Y.).

[0278] In addition, some of the large polypeptide growth factors play crucial roles in the induction of the primordial germ layers in the developing embryo. This induction ultimately results in the formation of the embryonic mesoderm, ectoderm, and endoderm which in turn provide the framework for the entire adult body plan. Disruption of this inductive process would be catastrophic to embryonic development.

[0279] Small Peptide Factors—Neuropeptides and Vasomediators

[0280] Neuropeptides and vasomediators (NP/VM comprise a family of small peptide factors, typically of 20 amino acids or less. These factors generally function in neuronal excitation and inhibition of vasoconstriction/vasodilation, muscle contraction, and hormonal secretions from the brain and other endocrine tissues. Included in this family are neuropeptides and neuropeptide hormones such as bombesin, neuropeptide Y, neurotensin, neuromedin N, melanocortins, opioids, galanin, somatostatin, tachykinns, urotensin II and related peptides involved in smooth muscle stimulation, vasopressin, vasoactive intestinal peptide, and circulatory system-borne signaling molecules such as angiotensin, complement, calcitonin, endothelins, formyl-methionyl peptides, glucagon, cholecystokinin, gastrin, and many of the peptide hormones discussed above. NP/VMs can transduce signals directly, modulate the activity or release of other neurotransmitters and hormones, and act as catalytic enzymes in signaling cascades. The effects of NP/VMs range from extremely brief to long-lasting. (Reviewed in Martin, C. R. et al. (1985) Endocrine Physiology, Oxford University Press, New York N.Y., pp. 57-62.)

[0281] Cytokines

[0282] Cytokines comprise a family of signaling molecules that modulate the immune system and the inflammatory response. Cytokines are usually secreted by leukocytes, or white blood cells, in response to injury or infection. Cytokines function as growth and differentiation factors that act primarily on cells of the immune system such as B- and T-lymphocytes, monocytes, macrophages, and granulocytes. Like other signaling molecules, cytokines bind to specific plasma membrane receptors and trigger intracellular signal transduction pathways which alter gene expression patterns. There is considerable potential for the use of cytokines in the treatment of inflammation and immune system disorders.

[0283] Cytokine structure and function have been extensively characterized in vitro. Most cytokines are small polypeptides of about 30 kilodaltons or less. Over 50 cytokines have been identified from human and rodent sources. Examples of cytokine subfamilies include the interferons (IFN-α, -β, and -γ), the interleukins (IL1-IL13), the tumor necrosis factors (TNF-αand -β), and the chemokines. Many cytokines have been produced using recombinant DNA techniques, and the activities of individual cytokines have been determined in vitro. These activities include regulation of leukocyte proliferation, differentiation, and motility.

[0284] The activity of an individual cytokine in vitro may not reflect the full scope of that cytokine's activity in vivo. Cytokines are not expressed individually in vivo but are instead expressed in combination with a multitude of other cytokines when the organism is challenged with a stimulus. Together, these cytokines collectively modulate the immune response in a manner appropriate for that particular stimulus. Therefore, the physiological activity of a cytokine is determined by the stimulus itself and by complex interactive networks among co expressed cytokines which may demonstrate both synergistic and antagonistic relationships.

[0285] Chemokines comprise a cytokine subfamily with over 30 members. (Reviewed in Wells, T. N. C. and M. C. Peitsch (1997) J. Leukoc. Biol. 61:545-550.) Chemokines were initially identified as chemotactic proteins that recruit monocytes and macrophages to sites of inflammation Recent evidence indicates that chemokines may also play key roles in hematopoiesis and HIV-1 infection. Chemokines are small proteins which range from about 6-15 kilodaltons in molecular weight. Chemokines are further classified as C, CC, CXC, or CX₃C based on the number and position of critical cysteine residues. The CC chemokines, for example, each contain a conserved motif consisting of two consecutive cysteines followed by two additional cysteines which occur downstream at 24- and 16-residue intervals, respectively (ExPASy PROSITE database, documents PS00472 and PDOC00434). The presence and spacing of these four cysteine residues are highly conserved, whereas the intervening residues diverge significantly. However, a conserved tyrosine located about 15 residues downstream of the cysteine doublet seems to be important for chemotactic activity. Most of the human genes encoding CC chemokines are clustered on chromosome 17, although there are a few examples of CC chemokine genes that map elsewhere. Other chemokines include lymphotactin (C chemokine); macrophage chemotactic and activating factor (MCAF/MCP-1; CC chemokine); platelet factor 4 and IL-8 (CXC chemokines); and fractalkine and neurotractin (CX₃C chemokines). (Reviewed in Luster, A. D. (1998) N. Engl. J. Med. 338:436445.)

[0286] Receptor Molecules

[0287] The term receptor describes proteins that specifically recognize other molecules. The category is broad and includes proteins with a variety of functions. The bulk of receptors are cell surface proteins which bind extracellular ligands and produce cellular responses in the areas of growth, differentiation, endocytosis, and immune response. Other receptors facilitate the selective transport of proteins out of the endoplasmic reticulum and localize enzymes to particular locations in the cell. The term may also be applied to proteins which act as receptors for ligands with known or unknown chemical composition and which interact with other cellular components. For example, the steroid hormone receptors bind to and regulate transcription of DNA

[0288] Regulation of cell proliferation, differentiation, and migration is important for the formation and function of tissues. Regulatory proteins such as growth factors coordinately control these cellular processes and act as mediators in cell-cell signaling pathways. Growth factors are secreted proteins that bind to specific cell-surface receptors on target cells. The bound receptors trigger intracellular signal transduction pathways which activate various downstream effectors that regulate gene expression, cell division, cell differentiation, cell motility, and other cellular processes.

[0289] Cell surface receptors are typically integral plasma membrane proteins. These receptors recognize hormones such as catecholamines; peptide hormones; growth and differentiation factors; small peptide factors such as thyrotropin-releasing hormone; galanin, somatostatin, and tachykinins; and circulatory system-borne signaling molecules. Cell surface receptors on immune system cells recognize antigens, antibodies, and major histocompatibility complex (MHC)-bound peptides. Other cell surface receptors bind ligands to be internalized by the cell. This receptor-mediated edocytosis functions in the uptake of low density lipoproteins (LDL), transferrin, glucose- or mannose-terminal glycoproteins, galactose-terminal glycoproteins, immunoglobulins, phosphovitellogenins, fibrin, proteinase-inhibitor complexes, plasminogen activators, and thrombospondin (Lodish, H. et al. (1995) Molecular Cell Biology, Scientific American Books, New York N.Y., p. 723; Mikhailenko, I. et al. (1997) J. Biol. Chem. 272:67846791).

[0290] Receptor Protein Kinases

[0291] Many growth factor receptors, including receptors for epidermal growth factor, platelet-derived growth factor, fibroblast growth factor, as well as the growth modulator α-thrombin, contain intrinsic protein kinase activities. When growth factor binds to the receptor, it triggers the autophosphorylation of a serine, threonine, or tyrosine residue on the receptor. These phosphorylated sites are recognition sites for the binding of other cytoplasmic signaling proteins. These proteins participate in signaling pathways that eventually link the initial receptor activation at the cell surface to the activation of a specific intracellular target molecule. In the case of tyrosine residue autophosphorylation, these signaling proteins contain a common domain referred to as a Src homology (SH) domain. SH2 domains and SH3 domains are found in phospholipase C-γ, PI-3-K p85 regulatory subunit, Ras-GTPase activating protein, and pp60^{c-src} (Lowenstein, E. J. et al. (1992) Cell 70:431-442). The cytokine family of receptors share a different common binding domain and include transmembrane receptors for growth hormone (GM), interleukins, erythropoietin, and prolactin.

[0292] Other receptors and second messenger-binding proteins have intrinsic serine/threonine protein kinase activity. These include activin/TGF-β/BMP-superfamily receptors, calcium- and diacylglycerol-activated/phospolipid-dependent protein kinase (PK-C), and RNA ant protein kinase (PK-R). In addition, other serine/threonine protein kinases, including nematode Twitchin, have fibronectin-like, immunoglobulin C2-like domains.

[0293] G-Protein Coupled Receptors

[0294] G-protein coupled receptors (GPCRs) are integral membrane proteins characterized by the presence of seven hydrophobic transmembrane domains which span the plasma membrane and form a bundle of antiparallel alpha (a) helices. These proteins range in size from under 400 to over 1000 amino acids (Strosberg, A. D. (1991) Eur. J. Biochem. 196:1-10; Coughlin, S. R. (1994) Curr. Opin. Cell Biol. 6:191-197). The amino-terminus of the GPCR is extracellular, of variable length and often glycosylated; the carboxy-terminus is cytoplasmic and generally phosphorylated. Extracellular loops of the GPCR alternate with intracellular loops and link the transmembrane domains. The most conserved domains of GPCRs are the transmembrane domains and the first two cytoplasmic loops. The transmembrane domains account for structural and functional features of the receptor. In most cases, the bundle of a helices forms a binding pocket. In addition, the extracellular N-terminal segment or one or more of the three extracellular loops may also participate in ligand binding. Ligand binding activates the receptor by inducing a conformational change in intracellular portions of the receptor. The activated receptor, in turn, interacts with an intracellular heterotrimeric guanine nucleotide binding (G) protein complex which mediates further intracellular signing activities, generally the production of second messengers such as cyclic AMP (cAMP), phospholipase C, inositol triphosphate, or interactions with ion channel proteins (Baldwin, J. M. (1994) Curr. Opin. Cell Biol. 6:180-190).

[0295] GPCRs include those for acetylcholine, adenosine, epinephrine and norepinephrine, bombesin, bradykinin, chemokines, dopamine, endothelin, γ-aminobutyric acid (GABA), follicle-stimulating hormone (FSH), glutamate, gonadotropin-releasing hormone (GnRH), hepatocyte growth factor, histamine, leukotrienes, melanocortins, neuropeptide Y, opioid peptides, opsins, prostanoids, serotonin, somatostatin, tachykinins, thrombin, thyrotropin-releasing hormone (TRH), vasoactive intestinal polypeptide family, vasopressin and oxytocin, and orphan receptors.

[0296] GPCR mutations, which may cause loss of function or constitutive activation, have been associated with numerous human diseases (Coughlin, supra). For instance, retinitis pigmentosa may arise from mutations in the rhodopsin gene. Rhodopsin is the retinal photoreceptor which is located within the discs of the eye rod cell. Parma, J. et al. (1993, Nature 365:649-651) report that somatic activating mutations in the thyrotropin receptor cause hyperfunctioning thyroid adenomas and suggest that certain GPCRs susceptible to constitutive activation may behave as protooncogenes.

[0297] Nuclear Receptors

[0298] Nuclear receptors bind small molecules such as hormones or second messengers, leading to increased receptor-binding affinity to specific chromosomal DNA elements. In addition the affinity for other nuclear proteins may also be altered. Such binding and protein-protein interactions may regulate and modulate gene expression. Examples of such receptors include the steroid hormone receptors family, the retinoic acid receptors family, and the thyroid hormone receptors family.

[0299] Ligand-Gated Receptor Ion Channels

[0300] Ligand-gated receptor ion channels fall into two categories. The first category, exacellular ligand-gated receptor ion channels (ELGs), rapidly transduce neurotransmitter-binding events into electrical signals, such as fast synaptic neurotransmission. ELG function is regulated by post-translational modification. The second category, intracellular ligand-gated receptor ion channels (ILGs), are activated by many intracellular second messengers and do not require post-translational modification(s) to effect a channel-opening response.

[0301] ELGs depolarize excitable cells to the threshold of action potential generation. In non-excitable cells, ELGs permit a limited calcium ion-influx during the presence of agonist. ELGs include channels directly gated by neurotransmitters such as acetylcholine, L-glutamate, glycine, ATP, serotonin, GABA, and histamine. ELG genes encode proteins having strong structural and functional similarities. ILGs are encoded by distinct and unrelated gene families and include receptors for cAMP, cGMP, calcium ions, ATP, and metabolites of arachidonic acid

[0302] Macrophage Scavenger Receptors

[0303] Macrophage scavenger receptors with broad ligand specificity may participate in the binding of low density lipoproteins (LDL) and foreign antigens. Scavenger receptors types I and II are trimeric membrane proteins with each subunit containing a small N-terminal intracellular domain, a transmembrane domain, a large extracellular domain, and a C-terminal cysteine-rich domain. The extracellular domain contains a short spacer domain, an α-helical coiled-coil domain, and a triple helical collagenous domain. These receptors have been shown to bind a spectrum of ligands, including chemically modified lipoproteins and albumin, polyribonucleotides, polysaccharides, phospholipids, and asbestos (Matsumoto, A. et al. (1990) Proc. Natl. Acad. Sci. USA 87:9133-9137; Elomaa, 0. et al. (1995) Cell 80:603-609). The scavenger receptors are thought to play a key role in atherogenesis by mediating uptake of modified LDL in arterial walls, and in host defense by binding bacterial endotoxins, bacteria, and protozoa.

[0304] T-Cell Receptors

[0305] T cells play a dual role in the immune system as effectors and regulators, coupling antigen recognition with the transmission of signals that induce cell death in infected cells and stimulate proliferation of other immune cells. Although a population of T cells can recognize a wide range of different antigens, an individual T cell can only recognize a single antigen and only when it is presented to the T cell receptor (TCR) as a peptide complexed with a major histocompatibility molecule (MHC) on the surface of an antigen presenting cell. The TCR on most T cells consists of immunoglobulin-like integral membrane glycoproteins containing two polypeptide subunits, a and A, of similar molecular weight. Both TCR subunits have an extracellular domain containing both variable and constant regions, a transmembrane domain that traverses the membrane once, and a short intracellular domain (Saito, H. et al. (1984) Nature 309:757-762). The genes for the TCR subunits are constructed through somatic rearrangement of different gene segments. Interaction of antigen in the proper MHC context with the TCR initiates signaling cascades that induce the proliferation, maturation, and function of cellular components of the immune system (Weiss, A. (1991) Annu. Rev. Gene. 25:487-510). Rearrangements in TCR genes and alterations in TCR expression have been noted in lymphomas, leukemias, autoimmune disorders, and immunodeficiency disorders (Aisenberg, A. C. et al. (1985) N. Engl. J. Med. 313:529-533; Weiss, supra).

[0306] Intracellular Signaling Molecules

[0307] Intracellular signaling is the general process by which cells respond to extracellular signals (hormones, neurotransmitters, growth and differentiation factors, etc.) through a cascade of biochemical reactions that begins with the binding of a signaling molecule to a cell membrane receptor and ends with the activation of an intracellular target molecule. Intermediate steps in the process involve the activation of various cytoplasmic proteins by phosphorylation via protein kinases, and their deactivation by protein phosphatases, and the eventual translocation of some of these activated proteins to the cell nucleus where the transcription of specific genes is triggered. The intracellular signaling process regulates an types of cell functions including cell proliferation, cell differentiation, and gene transcription, and involves a diversity of molecules including protein kinases and phosphatases, and second messenger molecules, such as cyclic nucleotides, calcium-calmodulin, inositol, and various mitogens, that regulate protein phosphorylation.

[0308] Protein Phosphorylation

[0309] Protein kinases and phosphatases play a key role in the intracellular signaling process by controlling the phosphorylation and activation of various signaling proteins. The high energy phosphate for this reaction is generally transferred from the adenosine triphosphate molecule (ATP) to a particular protein by a protein kinase and removed from that protein by a protein phosphatase. Protein kinases are roughly divided into two groups: those that phosphorylate tyrosine residues (protein tyrosine kinases, PTK) and those that phosphorylate serine or threonine residues (serine/threonine kinases, STK). A few protein kinases have dual specificity for serine/threonine and tyrosine residues. Almost all kinases contain a conserved 250-300 amino acid catalytic domain containing specific residues and sequence motifs characteristic of the kinase family (Hardie, G. and S. Hanks (1995) The Protein Kinase Facts Books, Vol 1:7-20, Academic Press, San Diego Calif.).

[0310] STKs include the second messenger dependent protein kinases such as the cyclic-AMP dependent protein kinases (PKA), involved in mediating hormone-induced cellular responses; calcium-calmodulin (CaM) dependent protein kinases, involved in regulation of smooth muscle contraction, glycogen breakdown, and neurotransmission; and the mitogen-activated protein kinases (MAP) which mediate signal transduction from the cell surface to the nucleus via phosphorylation cascades. Altered PKA expression is implicated in a variety of disorders and diseases including cancer, thyroid disorders, diabetes, atherosclerosis, and cardiovascular disease (Isselbacher, K. J. et al. (1994) Harrison's Principles of Internal Medicine, McGraw-Hill, New York N.Y., pp. 416-431, 1887).

[0311] PTKs are divided into transmembrane, receptor PTKs and nontransmembrane, non-receptor PTKs. Transmembrane PTKs are receptors for most growth factors. Non-receptor PTKs lack transmembrane regions and, instead, form complexes with the intracellular regions of cell surface receptors. Receptors that function through non-receptor PTKs include those for cytokines and hormones (growth hormone and prolactin) and antigen-specific receptors on T and B lymphocytes. Many of these PTKs were first identified as the products of mutant oncogenes in cancer cells in which their activation was no longer subject to normal cellular controls. In fact, about one third of the known oncogenes encode PTKs, and it is well known that cellular transformation (oncogenesis) is often accompanied by increased tyrosine phosphorylation activity (Charbonneau, H. and N. K. Tonks (1992) Annu. Rev. Cell Biol. 8:463493).

[0312] An additional family of protein kinases previously thought to exist only in procaryotes is the histidine protein kinase family (HPK). BPKs bear little homology with mammalian STKs or PTKs but have distinctive sequence motifs of their own (Davie, J. R. et al. (1995) J. Biol. Chem. 270:19861-19867). A histidine residue in the N-terminal half of the molecule (region I) is an autophosphorylation site. Three additional motifs located in the C-terminal half of the molecule include an invariant asparagine residue in region II and two glycine-rich loops characteristic of nucleotide binding domains in regions III and IV. Recently a branched chain alpha-ketoacid dehydrogenase kinase has been found with characteristics of HPK in rat (Davie, supra).

[0313] Protein phosphatases regulate the effects of protein kinases by removing phosphate groups from molecules previously activated by kinases. The two principal categories of protein phosphatases are the protein (serine/threonine) phosphatases (PPs) and the protein tyrosine phosphatases (PTPs). PPs dephosphorylate phosphoserine/threonine residues and are important regulators of many cAMP-mediated hormone responses (Cohen, P. (1989) Annu. Rev. Biochem. 58:453-508). PTPs reverse the effects of protein tyrosine kinases and play a significant role in cell cycle and cell signaling processes (Charbonneau, supra). As previously noted, many PTKs are encoded by oncogenes, and oncogenesis is often accompanied by increased tyrosine phosphorylation activity. It is therefore possible that PTPs may prevent or reverse cell transformation and the growth of various cancers by controlling the levels of tyrosine phosphorylation in cells. This hypothesis is supported by studies showing that overexpression of PTPs can suppress transformation in cells, and that specific inhibition of PTPs can enhance cell transformation (Charbonneau, supra).

[0314] Phospholipid and Inositol-Phosohate Signaling

[0315] Inositol phospholipids (phosphoinositides) are involved in an intracellular signaling pathway that begins with binding of a signaling molecule to a G-protein linked receptor in the plasma membrane. This leads to the phosphorylation of phosphatidylinositol (PI) residues on the inner side of the plasma membrane to the biphosphate state (PIP₂) by inositol kinases. Simultaneously, the G-protein linked receptor binding stimulates a trimeric G-protein which in turn activates a phosphoinositide-specific phospholipase C-β. Phospholipase C-β then cleaves PIP₂ into two products, inositol triphosphate (IP₃) and diacylglycerol. These two products act as mediators for separate signaling events. IP₃ diffuses through the plasma membrane to induce calcium release from the endoplasmic reticulum (ER), while diacylglycerol remains in the membrane and helps activate protein kinase C, an STK that phosphorylates selected proteins in the target cell. The calcium response initiated by IP₃ is terminated by the dephosphorylation of IP₃ by specific inositol phosphatases. Cellular responses that are mediated by this pathway are glycogen breakdown in the liver in response to vasopressin, smooth muscle contraction in response to acetylcholine, and thrombin-induced platelet aggregation.

[0316] Cyclic Nucleotide Signaling

[0317] Cyclic nucleotides (cAMP and cGMP) function as intracellular second messengers to transduce a variety of extracellular signals including hormones, light, and neurotransmitters. In particular, cyclic-AMP dependent protein kinases (PKA) are thought to account for all of the effects of cAMP in most mammalian cells, including various hormone-induced cellular responses. Visual excitation and the phototransmission of light signals in the eye is controlled by cyclic-GMP regulated, Ca²⁺-specific channels. Because of the importance of cellular levels of cyclic nucleotides in mediating these various responses, regulating the synthesis and breakdown of cyclic nucleotides is an important matter. Thus adenylyl cyclase, which synthesizes cAMP from AMP, is activated to increase cAMP levels in muscle by binding of adrenaline to β-andrenergic receptors, while activation of guanylate cyclase and increased cGMP levels in photoreceptors leads to reopening of the Ca²⁺-specific channels and recovery of the dark state in the eye. In contrast, hydrolysis of cyclic nucleotides by cAMP and cGMP-specific phosphodiesterases (PDEs) produces the opposite of these and other effects mediated by increased cyclic nucleotide levels. PDEs appear to be particularly important in the regulation of cyclic nucleotides, considering the diversity found in this family of proteins. At least seven families of mammalian PDEs (PDE1-7) have been identified based on substrate specificity and affinity, sensitivity to cofactors, and sensitivity to inhibitory drugs (Beavo, J. A. (1995) Physiological Reviews 75:725-748). PDE inhibitors have been found to be particularly useful in treating various clinical disorders. Rolipram, a specific inhibitor of PDE4, has been used in the treatment of depression, and similar inhibitors are undergoing evaluation as anti-inflammatory agents. Theophylline is a nonspecific PDE inhibitor used in the treatment of bronchial asthma and other respiratory diseases (Banner, K. H. and C. P. Page (1995) Eur. Respir. J. 8:996-1000).

[0318] G-Protein Signaling

[0319] Guanine nucleotide binding proteins (G-proteins) are critical mediators of signal transduction between a particular class of extracelluar receptors, the G-protein coupled receptors (GPCR), and intracellular second messengers such as cAMP and Ca²⁺. G-proteins are linked to the cytosolic side of a GPCR such that activation of the GPCR by ligand binding stimulates binding of the G-protein to GTP, inducing an “active” state in the G-protein. In the active state, the G-protein acts as a signal to trigger other events in the cell such as the increase of cAMP levels or the release of Ca²⁺ into the cytosol from the ER, which, in turn, regulate phosphorylation and activation of other intracellular proteins. Recycling of the G-protein to the inactive state involves hydrolysis of the bound GTP to GDP by a GTPase activity in the G-protein. (See Alberts, B. et al. (1994) Molecular Biology of the Cell, Garland Publishing, Inc., New York N.Y., pp.734-759.) Two structurally distinct classes of G-proteins are recognized: heterotrimeric G-proteins, consisting of three different subunits, and monomeric, low molecular weight (LMW), G-proteins consisting of a single polypeptide chain.

[0320] The three polypeptide subunits of heterotrimeric G-proteins are the α, β, and γ subunits. The α subunit binds and hydrolyzes GTP. The β and γ subunits form a tight complex that anchors the protein to the inner side of the plasma membrane. The β subunits, also known as G-β proteins or β transducins, contain seven tandem repeats of the WD-repeat sequence motif, a motif found in many proteins with regulatory functions. Mutations and variant expression of β transducin proteins are linked with various disorders (Neer, E. J. et al. (1994) Nature 371:297-300; Margottin, F. et al. (1998) Mol. Cell 1:565-574).

[0321] LMW GTP-proteins are GTPases which regulate cell growth, cell cycle control, protein secretion, and intracellular vesicle interaction. They consist of single polypeptides which, like the a subunit of the heterotrimeric G-proteins, are able to bind and hydrolyze GTP, thus cycling between an inactive and an active state. At least sixty members of the LMW G-protein superfamily have been identified and are currently grouped into the six subfamilies of ras, rho, arf, sar1, ran, and rab. Activated ras genes were initially found in human cancers, and subsequent studies conformed that ras function is critical in determining whether cells continue to grow or become differentiated. Other members of the LMW G-protein superfamily have roles in signal transduction that vary with the function of the activated genes and the locations of the G-proteins.

[0322] Guanine nucleotide exchange factors regulate the activities of LMW G-proteins by determining whether GTP or GDP is bound. GTPase-activating protein (GAP) binds to GTP-ras and induces it to hydrolyze GTP to GDP. In contrast, guanine nucleotide releasing protein (GNRP) binds to GDP-ras and induces the release of GDP and the binding of GTP.

[0323] Other regulators of G-protein signaling (RGS) also exist that act primarily by negatively regulating the G-protein pathway by an unknown mechanism (Druey, KM. et al. (1996) Nature 379:742-746). Some 15 members of the RGS family have been identified. RGS family members are related structurally through similarities in an approximately 120 amino acid region termed the RGS domain and functionally by their ability to inhibit the interleukin (cytokine) induction of MAP kinase in cultured mammalian 293T cells (Druey, supra).

[0324] Calcium Signaling Molecules

[0325] Ca⁺² is another second messenger molecule that is even more widely used as an intracellular mediator than cAMP. Two pathways exist by which Ca⁺² can enter the cytosol in response to extracellular signals: One pathway acts primarily in nerve signal transduction where Ca⁺² enters a nerve terminal through a voltage-gated Ca⁺² channel. The second is a more ubiquitous pathway in which Ca⁺² is released from the ER into the cytosol in response to binding of an extracellular signaling molecule to a receptor. Ca²⁺ directly activates regulatory enzymes, such as protein kinase C, which trigger signal transduction pathways. Ca²⁺ also binds to specific Ca²⁺-binding proteins (CBPs) such as calmodulin (CaM) which then activate multiple target proteins in the cell including enzymes, membrane transport pumps, and ion channels. CaM interactions are involved in a multitude of cellular processes including, but not limited to, gene regulation, DNA synthesis, cell cycle progression, mitosis, cytokinesis, cytoskeletal organization, muscle contraction, signal transduction, ion homeostasis, exocytosis, and metabolic regulation (Celio, M. R. et al. (1996) Guidebook to Calcium-binding Proteins, Oxford University Press, Oxford, UK, pp. 15-20). Some CBPs can serve as a storage depot for Ca²⁺ in an inactive state. Calsequestrin is one such CBP that is expressed in isoforms specific to cardiac muscle and skeletal muscle. It is suggested that calsequestrin binds Ca²⁺ in a rapidly exchangeable state that is released during Ca²⁺-signaling conditions (Celio, M. R. et al. (1996) Guidebook to Calcium-binding Proteins, Oxford University Press, New York N.Y., pp. 222-224).

[0326] Cyclins

[0327] Cell division is the fundamental process by which all living things grow and reproduce. In most organisms, the cell cycle consists of three principle steps; interphase, mitosis, and cytokinesis. Interphase, involves preparations for cell division, replication of the DNA and production of essential proteins. In mitosis, the nuclear material is divided and separates to opposite sides of the cell. Cytokinesis is the final division and fission of the cell cytoplasm to produce the daughter cells.

[0328] The entry and exit of a cell from mitosis is regulated by the synthesis and destruction of a family of activating proteins called cyclins. Cyclins act by binding to and activating a group of cyclin-dependent protein kinases (Cdks) which then phosphorylate and activate selected proteins involved in the mitotic process. Several types of cyclins exist (Ciechanover, A (1994) Cell 79:13-21.) Two principle types are mitotic cyclin, or cyclin B, which controls entry of the cell into mitosis, and G1 cyclin, which controls events that drive the cell out of mitosis.

[0329] Signal Complex Scaffolding Proteins

[0330] Ceretain proteins in intracellular signaling pathways serve to link or cluster other proteins involved in the signaling cascade. A conserved protein domain called the PDZ domain has been identified in various membrane-associated signaling proteins. This domain has been implicated in receptor and ion channel clustering and in the targeting of multiprotein signaling complexes to specialized functional regions of the cytosolic face of the plasma membrane. (For a review of PDZ domain-containing proteins, see Ponting, C. P. et al. (1997) Bioessays 19:469-479.) A large proportion of PDZ domains are found in the eukaryotic MAGUK (membrane-associated guanylate kinase) protein family, members of which bind to the intracellular domains of receptors and channels. However, PDZ domains are also found in diverse membrane-localized proteins such as protein tyrosine phosphatases, serine/threonine kinases, G-protein cofactors, and synapse-associated proteins such as syntrophins and neuronal nitric oxide synthase (nNOS). Generally, about one to three PDZ domains are found in a given protein, although up to nine PDZ domains have been identified in a single protein.

[0331] Membrane Transport Molecules

[0332] The plasma membrane acts as a barrier to most molecules. Transport between the cytoplasm and the extracellular environment, and between the cytoplasm and lumenal spaces of cellular organelles requires specific transport proteins. Each transport protein carries a particular class of molecule, such as ions, sugars, or amino acids, and often is specific to a certain molecular species of the class. A variety of human inherited diseases are caused by a mutation in a transport protein. For example, cystinuria is an inherited disease that results from the inability to transport cystine, the disulfide-linked dimer of cysteine, from the urine into the blood Accumulation of cystine in the urine leads to the formation of cystine stones in the kidneys.

[0333] Transport proteins are multi-pass transmembrane proteins, which either actively transport molecules across the membrane or passively allow them to cross. Active transport involves directional pumping of a solute across the membrane, usually against an electrochemical gradient Active transport is tightly coupled to a source of metabolic energy, such as ATP hydrolysis or an electrochemically favorable ion gradient. Passive transport involves the movement of a solute down its electrochemical gradient. Transport proteins can be further classified as either carrier proteins or channel proteins. Carrier proteins, which can function in active or passive transport, bind to a specific solute to be transported and undergo a conformational change which transfers the bound solute across the membrane. Channel proteins, which only function in passive transport, form hydrophilic pores across the membrane. When the pores open, specific solutes, such as inorganic ions, pass through the membrane and down the electrochemical gradient of the solute.

[0334] Carrier proteins which transport a single solute from one side of the membrane to the other are called uniporters. In contrast, coupled transporters link the transfer of one solute with simultaneous or sequential transfer of a second solute, either in the same direction (symport) or in the opposite direction (antiport). For example, intestinal and kidney epithelium contains a variety of symporter systems driven by the sodium gradient that exists across the plasma membrane. Sodium moves into the cell down its electrochemical gradient and brings the solute into the cell with it. The sodium gradient that provides the driving force for solute uptake is maintained by the ubiquitous Na⁺/K⁺ ATPase. Sodium-coupled transporters include the mammalian glucose transporter (SGLT1), iodide transporter (NIS), and multivitamin transporter (SMVT). All three transporters have twelve putative transmembrane segments, extracellular glycosylation sites, and cytoplasmically-oriented N- and C-termini. NIS plays a crucial role in the evaluation, diagnosis, and treatment of various thyroid pathologies because it is the molecular basis for radioiodide thyroid-imaging techniques and for specific targeting of radioisotopes to the thyroid gland (Levy, O. et al. (1997) Proc. Natl. Acad. Sci. USA 94:5568-5573). SMVT is expressed in the intestinal mucosa, kidney, and placenta, and is implicated in the transport of the water-soluble vitamins, e.g., biotin and pantothenate (Prasad, P. D. et al. (1998) J. Biol. Chem. 273:7501-7506).

[0335] Transporters play a major role in the regulation of pH, excretion of drugs, and the cellular K⁺/Na⁺ balance. Monocarboxylate anion transporters are proton-coupled symporters with a broad substrate specificity that includes L-lactate, pyruvate, and the ketone bodies acetate, acetoacetate, and beta-hydroxybutyrate. At least seven isoforms have been identified to date. The isoforms are predicted to have twelve transmembrane (TM) helical domains with a large intracellular loop between TM6 and TM7, and play a critical role in maintaining intracellular pH by removing the protons that are produced stoichiometrically with lactate during glycolysis. The best characterized H(+)-monocarboxylate transporter is that of the erythrocyte membrane, which transports L-lactate and a wide range of other aliphatic monocarboxylates. Other cells possess H(+)-linked monocarboxylate transporters with differing substrate and inhibitor selectivities. In particular, cardiac muscle and tumor cells have transporters that differ in their Kₘ values for certain substrates, including stereoselectivity for L-over D-lactate, and in their sensitivity to inhibitors. There are Na(+)-monocarboxylate cotransporters on the luminal surface of intestinal and kidney epithelia, which allow the uptake of lactate, pyruvate, and ketone bodies in these tissues. In addition, there are specific and selective transporters for organic cations and organic anions in organs including the kidney, intestine and liver. Organic anion transporters are selective for hydrophobic, charged molecules with electron-attracting side groups. Organic cation transporters, such as the ammonium transporter, mediate the secretion of a variety of drugs and endogenous metabolites, and contribute to the maintenance of intercellular pH. (Poole, R. C. and A. P. Halestrap (1993) Am J. Physiol. 264:C761-C782; Price, N. T. et al. (1998) Biochnol. J. 329:321-328; and Martinelle, Ky. and I. Haggstrom (1993) J. Biotechnol. 30: 339-350.)

[0336] The largest and most diverse family of transport proteins known is the ATP-binding cassette (ABC) transporters. As a family, ABC transporters can transport substances that differ markedly in chemical structure and size, ranging from small molecules such as ions, sugars, amino acids, peptides, and phospholipids, to lipopeptides, large proteins, and complex hydrophobic drugs. ABC proteins consist of four modules: two nucleotide-binding domains (NBD), which hydrolyze ATP to supply the energy required for transport, and two membrane-spanning domains (MSD), each containing six putative transmembrane segments. These four modules may be encoded by a single gene, as is the case for the cystic fibrosis transmembrane regulator (CFTR), or by separate genes. When encoded by separate genes, each gene product contains a single NBD and MSD. These “half-molecales” form homo- and heterodimers, such as Tap1 and Tap2, the endoplasmic reticulum-based major histocompatibility (MHC) peptide transport system. Several genetic diseases are attributed to defects in ABC transporters, such as the following diseases and their corresponding proteins: cystic fibrosis (CFTR, an ion channel), adrenoleukodystrophy (adrenoleukodystrophy protein, ALDP), Zellweger syndrome (peroxisomal membrane protein-70, PMP70), and hyperinsulinemic hypoglycemia (sulfonylurea receptor, SUR). Overexpression of the multidrug resistance (MDR) protein, another ABC transporter, in human cancer cells makes the cells resistant to a variety of cytotoxic drugs used in chemotherapy (Taglight, D. and S. Michaelis (1998) Meth. Enzymol. 292:131-163).

[0337] Transport of fatty acids across the plasma membrane can occur by diffusion, a high capacity, low affinity process. However, under normal physiological conditions a significant fraction of fatty acid transport appears to occur via a high affinity, low capacity protein-mediated transport process. Fatty acid transport protein (FATP), an integral membrane protein with four transmembrane segments, is expressed in tissues exhibiting high levels of plasma membrane fatty acid flux, such as muscle, heart, and adipose. Expression of FATP is upregulated in 3T3-L1 cells during adipose conversion, and expression in COS7 fibroblasts elevates uptake of long-chain fatty acids (Hui, T. Y. et al. (1998) J. Biol. Chem. 273:27420-27429).

[0338] Ion Channels

[0339] The electrical potential of a cell is generated and maintained by controlling the movement of ions across the plasma membrane. The movement of ions requires ion channels, which form an ion-selective pore within the membrane. There are two basic types of ion channels, ion transporters and gated ion channels. Ion transporters utilize the energy obtained from ATP hydrolysis to actively transport an ion against the ion's concentration gradient Gated ion channels allow passive flow of an ion down the ion's electrochemical gradient under restricted conditions. Together, these types of ion channels generate, maintain, and utilize an electrochemical gradient that is used in 1) electrical impulse conduction down the axon of a nerve cell, 2) transport of molecules into cells against concentration gradients, 3) initiation of muscle contraction, and 4) endocrine cell secretion.

[0340] Ion transporters generate and maintain the resting electrical potential of a cell. Utilizing the energy derived from ATP hydrolysis, they transport ions against the ion's concentration gradient. These transmembrane ATPases are divided into three families. The phosphorylated (P) class ion transporters, including Na⁺-K⁺ ATPase, Ca²⁺-ATPase, and H⁺-ATPase, are activated by a phosphorylation event. P-class ion transporters are responsible for maintaining resting potential distributions such that cytosolic concentrations of Na⁺ and Ca⁺ are low and cytosolic concentration of K⁺ is high. The vacuolar (V) class of ion transporters includes H⁺ pumps on intracellular organelles, such as lysosomes and Golgi. V-class ion transporters are responsible for generating the low pH within the lumen of these organelles that is required for function. The coupling factor (F) class consists of H⁺ pumps in the mitochondria. F-class ion transporters utilize a proton gradient to generate ATP from ADP and inorganic phosphate (Pᵢ).

[0341] The resting potential of the cell is utilized in many processes involving carrier proteins and gated ion channels. Carrier proteins utilize the resting potential to transport molecules into and out of the cell. Amino acid and glucose transport into many cells is linked to sodium ion co-transport (symport) so that the movement of Na⁺ down an electrochemical gradient drives transport of the other molecule up a concentration gradient. Similarly, cardiac muscle links transfer of Ca²⁺ out of the cell with transport of Nat into the cell (antiport).

[0342] Ion channels share common structural and mechanistic themes. The channel consists of four or five subunits or protein monomers that are arranged like a barrel in the plasma membrane. Each subunit typically consists of six potential transmembrane segments (S1, S2, S3, S4, S5, and S6). The center of the barrel forms a pore lined by α-helices or β-strands. The side chains of the amino acid residues comprising the α-helices or β-strands establish the charge (cation or anion) selectivity of the channel. The degree of selectivity, or what specific ions are allowed to pass through the channel, depends on the diameter of the narrowest part of the pore.

[0343] Gated ion channels control ion flow by regulating the opening and closing of pores. These channels are categorized according to the manner of regulating the gating function. Mechanically-gated channels open pores in response to mechanical stress, voltage-gated channels open pores in response to changes in membrane potential, and ligand-gated channels open pores in the presence of a specific ion, nucleotide, or neurotransmitter.

[0344] Voltage-gated Na⁺ and K⁺ channels are necessary for the function of electrically excitable cells, such as nerve and muscle cells. Action potentials, which lead to neurotransmittter release and muscle contraction, arise from large, transient changes in the permeability of the membrane to Na⁺ and K⁺ ions. Depolarization of the membrane beyond the threshold level opens voltage-gated Na⁺ channels. Sodium ions flow into the cell, further depolarizing the membrane and opening more voltage-gated Na⁺ channels, which propagates the depolarization down the length of the cell. Depolarization also opens voltage-gated potassium channels. Consequently, potassium ions flow outward, which leads to repolarization of the membrane. Voltage-gated channels utilize charged residues in the fourth transmembrane segment (S4) to sense voltage change. The open state lasts only about 1 millisecond, at which tire the channel spontaneously converts into an inactive state that cannot be opened irrespective of the membrane potential. Inactivation is mediated by the channel's N-terminus, which acts as a plug that closes the pore. The transition from an inactive to a closed state requires a return to resting potential.

[0345] Voltage-gated Na⁺ channels are heterotrimeric complexes composed of a 260 kDa pore forming α subunit that associates with two smaller auxiliary subunits, β1 and β2. The β2 subunit is an integral membrane glycoprotein that contains an extracellular Ig domain, and its association with a and β1 subunits correlates with increased functional expression of the channel, a change in its gating properties, and an increase in whole cell capacitance due to an increase in membrane surface area. (Isom, L. L. et al. (1995) Cell 83:433442.)

[0346] Voltage-gated Ca²⁺ channels are involved in presynaptic neurotransmitter release, and heart and skeletal muscle contraction. The voltage-gated Ca²⁺ channels from skeletal muscle (L-type) and brain (N-type) have been purified, and though their functions differ dramatically, they have similar subunit compositions. The channels are composed of three subunits. The a, subunit forms the membrane pore and voltage sensor, while the α₂δ and β subunits modulate the voltage-dependence, gating properties, and the current amplitude of the channel. These subunits are encoded by at least six α₁, one α₂δ, and four β genes. A fourth subunit, γ, has been identified in skeletal muscle. (Walker, D. et al. (1998) J. Biol. Chem. 273:2361-2367; and Jay, S. D. et al. (1990) Science 248:490-492.)

[0347] Chloride channels are necessary in endocrine secretion and in regulation of cytosolic and organelle pH. In secretory epithelial cells, Cl⁻ enters the cell across a basolateral membrane through an Na⁺, K⁺/Cl⁻ cotransporter, accumulating in the cell above its electrochemical equilibrium concentration. Secretion of Cl⁻ from the apical surface, in response to hormonal stimulation, leads to flow of Na⁺ and water into the secretory lumen. The cystic fibrosis transmembrane conductance regulator (CFTR) is a chloride channel encoded by the gene for cystic fibrosis, a common fatal genetic disorder in humans. Loss of CFTR function decreases transepithelial water secretion and, as a result, the layers of mucus that coat the respiratory tree, pancreatic ducts, and intestine are dehydrated and difficult to clear. The resulting blockage of these sites leads to pancreatic insufficiency, “meconium ileus”, and devastating “chronic obstructive pulmonary disease” (AI-Awqati, Q. et al. (1992) J. Exp. Biol. 172:245-266).

[0348] Many intracellular organelles contain H⁺-ATPase pumps that generate transmembrane pH and electrochemical differences by moving protons from the cytosol to the organelle lump. If the membrane of the organelle is permeable to other ions, then the electrochemical gradient can be abrogated without affecting the pH differential. In fact, removal of the electrochemical barrier allows more H⁺ to be pumped across the membrane, increasing the pH differential. Cl⁻ is the sole counterion of H⁺ translocation in a number of organelles, including chromaffin granules, Golgi vesicles, lysosomes, and endosomes. Functions that require a low vacuolar pH include uptake of small molecules such as biogenic amines in chromaffin granules, processing of vacuolar constituents such as pro-hormones by proteolytic enzymes, and protein degradation in lysosomes (Al-Awqati, supra).

[0349] Ligand-gated channels open their pores when an extracellular or intracellular mediator binds to the channel. Neurotransmitter-gated channels are channels that open when a neurotransmitter binds to their extracellular domain. These channels exist in the postsynaptic membrane of nerve or muscle cells. There are two types of neurotransmitter-gated channels. Sodium channels open in response to excitatory neurotransmitters, such as acetylcholine, glutamate, and serotonin. This opening causes an influx of Na⁺ and produces the initial localized depolarization that activates the voltage-gated channels and starts the action potential. Chloride channels open in response to inhibitory neurotransmitters, such as γ-aminobutyric acid (GABA) and glycine, leading to hyperpolarization of the membrane and the subsequent generation of an action potential.

[0350] Ligand-gated channels can be regulated by intracellular second messengers. Calcium-activated K⁺ channels are gated by internal calcium ions. In nerve cells, an influx of calcium during depolarization opens K⁺ channels to modulate the magnitude of the action potential ([shi, T. M. et al. (1997) Proc. Natl. Acad. Sci. USA 94:11651-11656). Cyclic nucleotide-gated (CNG) channels are gated by cytosolic cyclic nucleotides. The best examples of these are the cAMP-gated Na⁺ channels involved in olfaction and the cGMP-gated cation channels involved in vision. Both systems involve ligand-mediated activation of a G-protein coupled receptor which then alters the level of cyclic nucleotide within the cell.

[0351] Ion channels are expressed in a number of tissues where they are implicated in a variety of processes. CNG channels, while abundantly expressed in photoreceptor and olfactory sensory cells, are also found in kidney, lung, pineal, retinal ganglion cells, testis, aorta, and brain. Calcium-activated K⁺ channels may be responsible for the vasodilatory effects of bradykinin in the kidney and for shunting excess K⁺ from brain capillary endothelial cells into the blood. They are also implicated in repolarizing granulocytes after agonist-stimulated depolarization (Ishi, supra). Ion channels have been the target for many drug therapies. Neurotransmitter-gated channels have been targeted in therapies for treatment of insomnia, anxiety, depression, and schizophrenia. Voltage-gated channels have been targeted in therapies for arrhythmia, ischemic stroke, head trauma, and neurodegenerative disease (Taylor, C. P. and L. S. Narasimhan (1997) Adv. Pharmacol. 39:47-98).

[0352] Disease Correlation

[0353] The etiology of numerous human diseases and disorders can be attributed to defects in the transport of molecules across membranes. Defects in the trafficking of membrane-bound transporters and ion channels are associated with several disorders, e.g. cystic fibrosis, glucose-galactose malabsorption syndrome, hypercholesterolemia, von Gierke disease, and certain forms of diabetes mellitus. Single-gene defect diseases resulting in an inability to transport small molecules across membranes include, e.g., cystinuria, iminoglycinuria, Hartup disease, and Fanconi disease (van't Hoff, W. G. (1996) Exp. Nephrol. 4:253-262; Talente, G. M. et al. (1994) Ann. Intern. Med. 120:218-226; and Chillon, M. et al. (1995) New Engl. J. Med. 332:1475-1480).

[0354] Protein Modification and Maintenance Molecules

[0355] The cellular processes regulating modification and maintenance of protein molecules coordinate their conformation, stabilization, and degradation. Each of these processes is mediated by key enzymes or proteins such as proteases, protease inhibitors, transferases, isomerases, and molecular chaperones.

[0356] Proteases

[0357] Proteases cleave proteins and peptides at the peptide bond that forms the backbone of the peptide and protein chain Proteolytic processing is essential to cell growth, differentiation, remodeling, and homeostasis as well as inflammation and immune response. Typical protein half-lives range from hours to a few days, so that within all living cells, precursor proteins are being cleaved to their active form, signal sequences proteolytically removed from targeted proteins, and aged or defective proteins degraded by proteolysis. Proteases function in bacterial, parasitic, and viral invasion and replication within a host. Four principal categories of mammalian proteases have been identified based on active site structure, mechanism of action, and overall three-dimensional structure. (Beynon, R. J. and J. S. Bond (1994) Proteolytic Enzymes: A Practical Approach, Oxford University Press, New York N.Y., pp. 1-5).

[0358] The serine proteases (SPs) have a serine residue, usually within a conserved sequence, in an active site composed of the serine, an aspartate, and a histidine residue. SPs include the digestive enzymes trypsin and chymotrypsin, components of the complement cascade and the blood-clotting cascade, and enzymes that control extracellular protein degradation. The main SP sub-families are trypases, which cleave after arginine or lysine; aspartases, which cleave after aspartate; chymases, which cleave after phenylalanine or leucine; metases, which cleavage after methionine; and serases which cleave after serine. Enterokinase, the initiator of intestinal digestion, is a serine protease found in the intestinal brush border, where it cleaves the acidic propeptide from trypsinogen to yield active trypsin (Kitamoto, Y. et al. (1994) Proc. Natl. Acad. Sci. USA 91:7588-7592). Prolylcarboxypeptidase, a lysosomal serine peptidase that cleaves peptides such as angiotensin II and III and [des-Arg9] bradykinin, shares sequence homology with members of both the serine carboxypeptidase and prolylendopeptidase families (Tan, F. et al. (1993) J. Biol. Chem. 268:16631-16638).

[0359] Cysteine proteases (CPs) have a cysteine as the major catalytic residue at an active site where catalysis proceeds via an intermediate thiol ester and is facilitated by adjacent histidine and aspartic acid residues. CPs are involved in diverse cellular processes ranging from the processing of precursor proteins to intracellular degradation. Mammalian CPs include lysosomal cathepsins and cytosolic calcium activated proteases, calpains. CPs are produced by monocytes, macrophages and other cells of the immune system which migrate to sites of inflammation and secrete molecules involved in tissue repair. Overabundance of these repair molecules plays a role in certain disorders. In autoimmune diseases such as rheumatoid arthritis, secretion of the cysteine peptidase cathepsin C degrades collagen, laminin, elastin and other structural proteins found in the extracellular matrix of bones.

[0360] Aspartic proteases are members of the cathepsin family of lysosomal proteases and include pepsin A, gastricsin, chymosin, renin, and cathepsins D and E. Aspartic proteases have a pair of aspartic acid residues in the active site, and are most active in the pH 2-3 range, in which one of the aspartate residues is ionized, the other un-ionized. Aspartic proteases include bacterial penicillopepsin, mammalian pepsin, renin, chymosin, and certain fungal proteases. Abnormal regulation and expression of cathepsins is evident in various inflammatory disease states. In cells isolated from inflamed synovia, the mRNA for stromelysin, cytokines, TEMP-1, cathepsin, gelatinase, and other molecules is preferentially expressed. Expression of cathepsins L and D is elevated in synovial tissues from patients with rheumatoid arthritis and osteoarthritis. Cathepsin L expression may also contribute to the influx of mononuclear cells which exacerbates the, destruction of the rheumatoid synovium (Keyszer, G. M. (1995) Arthritis Rheum. 38:976-984.) The increased expression and differential regulation of the, cathepsins are linked to the metastatic potential of a variety of cancers and as such are of therapeutic and prognostic interest (Chambers, A. F. et al. (1993) Crit. Rev. Oncog. 4:95-114).

[0361] Metalloproteaes have active sites that include two glutamic acid residues and one histidine residue that serve as binding sites for Zinc. Carboxypeptidases A and B are the principal mammalian metalloproteases. Both are exoproteases of similar structure and active sites. Carboxypeptidase A, like chymotrypsin prefers C-terminal aromatic and aliphatic side chains of hydrophobic nature, whereas carboxypeptidase B is directed toward basic arginine and lysine residues. Glycoprotease (GCP), or O-sialoglycoprotein endopeptidase, is a metallopeptidase which specifically cleaves O-sialoglycoproteins such as glycophorin A. Another metallopeptidase, placental leucine aminopeptidase (P-LAP) degrades several peptide hormones such as oxytocin and vasopressin, suggesting a role in maintaining homeostasis during pregnancy, and is expressed in several tissues (Rogi, T. et al. (1996) J. Biol. Chem. 271:56-61).

[0362] Ubiquitin proteases are associated with the ubiquitin conjugation system (UCS), a major pathway for the degradation of cellular proteins in eukaryotic cells and some bacteria. The UCS mediates the elimination of abnormal proteins and regulates the half-lives of important regulatory proteins that control cellular processes such as gene transcription and cell cycle progression. In the UCS pathway, proteins targeted for degradation are conjugated to a ubiquitin, a small heat stable protein. The ubiquitinated protein is then recognized and degraded by proteasome, a large, multisubunit proteolytic enzyme complex, and ubiquitin is released for reutilization by ubiquitin protease. The UCS is implicated in the degradation of mitotic cyclic kinases, oncoproteins, tumor suppressor genes such as p53, viral proteins, cell surface receptors associate with signal transduction, transcriptional regulators, and mutated or damaged proteins (Ciechanover, k (1994) Cell 79:13-21). A murine proto-oncogene, Unp, encodes a nuclear ubiquitin protease whose overexpression leads to oncogenic transformation of NIH3T3 cells, and the human homolog of this gene is consistently elevated in small cell tumors and adenocarcinomas of the lung (Gray, D. A. (1995) Oncogene 10:2179-2183).

[0363] Signal Peptidases

[0364] The mechanism for the translocation process into the endoplasmic reticulum (ER) involves the recognition of an N-terminal signal peptide on the elongating protein. The signal peptide direct the protein and attached ribosome to a receptor on the ER membrane. The polypeptide chain passes through a pore in the ER membrane into the lumen while the N-terminal signal peptide remains attached at the membrane surface. The process is completed when signal peptidase located inside the ER cleaves the signal peptide from the protein and releases the protein into the lumen.

[0365] Protease Inhibitors

[0366] Protease inhibitors and other regulators of protease activity control the activity and effects of proteases. Protease inhibitors have been shown to control pathogenesis in animal models of proteolytic disorders (Murphy, G. (1991) Agents Actions Suppl. 35:69-76). Low levels of the cystatins, low molecular weight inhibitors of the cysteine proteases, correlate with malignant progression of tumors. (Calkins, C. et al (1995) Biol. Biochem. Hoppe Seyler 376:71-80). Serpins are inhibitors of mammalian plasma serine proteases. Many serpins serve to regulate the blood clotting cascade and/or the complement cascade in mammals. Sp32 is a positive regulator of the mammalian acrosomal protease, acrosin, that binds the proenzyme, proacrosin, and thereby aides in packaging the enzyme into the acrosomnal matrix (Baba, T. et al. (1994) 1. Biol. Chem. 269:10133-10140). The Kunitz family of serine protease inhibitors are characterized by one or more “Kunitz domains” containing a series of cysteine residues that are regularly spaced over approximately 50 amino acid residues and form three intrachain disulfide bonds. Members of this family include aprotinin, tissue factor pathway inhibitor (TFPI-1 and TFPI-2), inter-α-trypsin inhibitor, and bikunin. (Marlor, C. W. et al. (1997) J. Biol. Chem. 272:12202-12208.) Members of this family are potent inhibitors (in the nanomolar range) against serine proteases such as kallikrein and plasmin. Aprotinin has clinical utility in reduction of perioperative blood loss.

[0367] A major portion of all proteins synthesized in eukaryotic cells are synthesized on the cytosolic surface of the endoplasmic reticulum (ER). Before these immature proteins are distributed to other organelles in the cell or are secreted, they must be transported into the interior lumen of the ER where post-translational modifications are performed. These modifications include protein folding and the formation of disulfide bonds, and N-linked glycosylations.

[0368] Protein Isomerases

[0369] Protein folding in the ER is aided by two principal types of protein isomerases, protein disulfide isomerase (PDI), and peptidyl-prolyl isomerase (PPI). PDI catalyzes the oxidation of free sulfhydryl groups in cysteine residues to form intramolecular disulfide bonds in proteins. PPI, an enzyme that catalyzes the isomerization of certain proline imidic bonds in oligopeptides and proteins, is considered to govern one of the rate limiting steps in the folding of many proteins to their final functional conformation. The cyclophilins represent a major class of PPI that was originally identified as the major receptor for the immunosuppressive drug cyclosporin A (Handschumacher, R. E. et al. (1984) Science 226: 544-547).

[0370] Protein Glycosylation

[0371] The glycosylation of most soluble secreted and membrane-bound proteins by oligosaccharides linked to asparagine residues in proteins is also performed in the ER. This reaction is catalyzed by a membrane-bound enzyme, oligosaccharyl transferase. Although the exact purpose of this “N-linked” glycosylation is unknown, the presence of oligosaccharides tends to make a glycoprotein resistant to protease digestion. In addition, oligosaccharides attached to cell-surface proteins called selectins are known to function in cell-cell adhesion processes (Alberts, B. et al. (1994) Molecular Biology of the Cell, Garland Publishing Co., New York N.Y., p.608). “O-linked” glycosylation of proteins also occurs in the ER by the addition of N-acetylgalactosamine to the hydroxyl group of a serine or threonine residue followed by the sequential addition of other sugar residues to the first. This process is catalysed by a series of glycosyltransferases each specific for a particular donor sugar nucleotide and acceptor molecule (Lodish, H. et al. (1995) Molecular Cell Biology, W. H. Freeman and Co., New York N.Y., pp.700-708). In many cases, both N- and O-linked oligosaccharides appear to be required for the secretion of proteins or the movement of plasma membrane glycoproteins to the cell surface.

[0372] An additional glycosylation mechanism operates in the ER specifically to target lysosomal enzymes to lysosomes and prevent their secretion. Lysosomal enzymes in the ER receive an N-linked oligosaccharide, like plasma membrane and secreted proteins, but are then phosphorylated on one or two mannose residues. The phosphorylation of mannose residues occurs in two steps, the first step being the addition of an N-acetylglucosamine phosphate residue by N-acetylglucosamine phosphotransferase, and the second the removal of the N-acetylglucosamine group by phosphodiesterase. The phosphorylated mannose residue then targets the lysosomal enzyme to a mannose 6-phosphate receptor which transports it to a lysosome vesicle (Lodish, supra, pp.708-711).

[0373] Chaperones

[0374] Molecular chaperones are proteins that aid in the proper folding of immature proteins and refolding of improperly folded ones, the assembly of protein subunits, and in the transport of unfolded proteins across membranes. Chaperones are also called heat-shock proteins (hsp) because of their tendency to be expressed in dramatically increased amounts following brief exposure of cells to elevated temperatures. This latter property most likely reflects their need in the refolding of proteins that have become denatured by the high temperatures. Chaperones may be divided into several classes according to their location, function, and molecular weight, and include hsp60, TCP1, hsp70, hsp40 (also called DnaJ), and hsp90. For example, hsp90 binds to steroid hormone receptors, represses transcription in the absence of the ligand, and provides proper folding of the ligand-binding domain of the receptor in the presence of the hormone (Burston, S. G. and A. R. Clarke (1995) Essays Biochem. 29:125-136). Hsp60 and hsp70 chaperones aid in the transport and folding of newly synthesized proteins. Hsp70 acts early in protein folding, binding a newly synthesized protein before it leaves the ribosome and transporting the protein to the mitochondria or ER before releasing the folded protein. Hsp60, along with hsp10, binds misfolded proteins and gives them the opportunity to refold correctly. All chaperones share an affinity for hydrophobic patches on incompletely folded proteins and the ability to hydrolyze ATP. The energy of ATP hydrolysis is used to release the hsp-bound protein in its properly folded state (Alberts, supra, pp 214, 571-572).

[0375] Nucleic Acid Synthesis and Modification Molecules

[0376] Polymerases

[0377] DNA and RNA replication are critical processes for cell replication and function. DNA and RNA replication are mediated by the enzymes DNA and RNA polymerase, respectively, by a “templating” process in which the nucleotide sequence of a DNA or RNA strand is copied by complementary base-pairing into a complementary nucleic acid sequence of either DNA or RNA. However, there are fundamental differences between the two processes.

[0378] DNA polymerase catalyzes the stepwise addition of a deoxyribonucleotide to the 3′-OH end of a polynucleotide strand (the primer strand) that is paired to a second (template) strand. The new DNA strand therefore grows in the 5′ to 3′ direction (Alberts, B. et al. (1994)The Molecular Biology of the Cell, Garland Publishing Inc., New York N.Y., pp. 251-254). The substrates for the polymerization reaction are the corresponding deoxynucleotide triphosphates which must base-pair with the correct nucleotide on the template strand in order to be recognized by the polymerase. Because DNA exists as a double-stranded helix, each of the two strands may serve as a template for the formation of a new complementary strand. Each of the two daughter cells of the dividing cell therefore inherits a new DNA double helix containing one old and one new strand. Thus, DNA is said to be replicated “semiconservatively” by DNA polymerase. In addition to the synthesis of new DNA, DNA polymerase is also involved in the repair of damaged DNA as discussed below under “Ligases.”

[0379] In contrast to DNA polymerase, RNA polymerase uses a DNA template strand to “transcribe” DNA into RNA using ribonucleotide triphosphates as substrates. Like DNA polymerization, RNA polymerization proceeds in a 5′ to 3′ direction by addition of a ribonucleoside monophosphate to the 3′-OH end of a growing RNA chain DNA transcription generates messenger RNAs (mRNA) that carry information for protein synthesis, as well as the transfer, ribosomal, and other RNAs that have structural or catalytic functions. In eukaryotes, three discrete RNA polymerases synthesize the three different types of RNA (Alberts, supra, pp. 367-368). RNA polymerase I makes the large ribosomal RNAs, RNA polymerase II makes the mRNAs that will be translated into proteins, and RNA polymerase III makes a variety of small, stable RNAs, including 5S ribosomal RNA and the transfer RNAs (tRNA). In all cases, RNA synthesis is initiated by binding of the RNA polymerase to a promoter region on the DNA and synthesis begins at a start site within the promoter. Synthesis is completed at a broad, general stop or termination region in the DNA where both the polymerase and the completed RNA chain are released.

[0380] Ligases

[0381] DNA repair is the process by which accidental base changes, such as those produced by oxidative damage, hydrolytic attack, or uncontrolled methylation of DNA are corrected before replication or transcription of the DNA can occur. Because of the efficiency of the DNA repair process, fewer than one in one thousand accidental base changes causes a mutation (Alberts, sutra, pp. 245-249). The three steps common to most types of DNA repair are (1) excision of the damaged or altered base or nucleotide by DNA nucleases, leaving a gap; (2) insertion of the correct nucleotide in this gap by DNA polymerase using the complementary strand as the template; and (3) sealing the break left between the inserted nucleotide(s) and the existing DNA strand by DNA ligase. In the last reaction, DNA ligase uses the energy from ATP hydrolysis to activate the 5′ end of the broken phosphodiester bond before forming the new bond with the 3′-OH of the DNA strand. In Bloom's syndrome, an inherited human disease, individuals are partially deficient in DNA ligation and consequently have an increased incidence of cancer (Alberts, supra, p. 247).

[0382] Nucleases

[0383] Nucleases comprise both enzymes that hydrolyze DNA (DNase) and RNA (RNase). They serve different purposes in nucleic acid metabolism. Nucleases hydrolyze the phosphodiester bonds between adjacent nucleotides either at internal positions (endonucleases) or at the terminal 3′ or, 5′ nucleotide positions (exonucleases). A DNA exonuclease activity in DNA polymerase, for example, serves to remove improperly paired nucleotides attached to the 3′-OH end of the growing DNA strand by the polymerase and thereby serves a “proofreading” function. As mentioned above, DNA endonuclease activity is involved in the excision step of the DNA repair process.

[0384] RNases also serve a variety of functions. For example, RNase P is a ribonucleoprotein enzyme which cleaves the 5′ end of pre-tRNAs as part of their maturation process. RNase H digests the RNA strand of an RNA/DNA hybrid Such hybrids occur in cells invaded by retroviruses, and RNase H is an important enzyme in the retroviral replication cycle. Pancreatic RNase secreted by the pancreas into the intestine hydrolyzes RNA present in ingested foods. RNase activity in serum and cell extracts is elevated in a variety of cancers and infectious diseases (Schein, C. H. (1997) Nat Biotechnol. 15:529-536). Regulation of RNase activity is being investigated as a means to control tumor angiogenesis, allergic reactions, viral infection and replication, and fungal infections.

[0385] Methylases

[0386] Methylation of specific nucleotides occurs in both DNA and RNA, and serves different functions in the two macromolecules. Methylation of cytosine residues to form 5-methyl cytosine in DNA occurs specifically at CG sequences which are base-paired with one another in the DNA double-helix. This pattern of methylation is passed from generation to generation during DNA replication by an enzyme called “maintenance methylase” that acts preferentially on those CG sequences that are base-paired with a CG sequence that is already methylated. Such methylation appears to distinguish active from inactive genes by preventing the binding of regulatory proteins that “turn on”, the gene, but permit the binding of proteins that inactivate the gene (Alberts, supra, pp. 448-451). In RNA metabolism, “tRNA methylase” produces one of several nucleotide modifications in tRNA that affect the conformation and base-pairing of the molecule and facilitate the recognition of the appropriate mRNA codons by specific tRNAs. The primary methylation pattern is the dimethylation of guanine residues to form N,N-dimethyl guanine.

[0387] Helicases and Single-Stranded Binding Proteins

[0388] Helicases are enzymes that destabilize and unwind double helix structures in both DNA and RNA. Since DNA replication occurs more or less simultaneously on both strands, the two strands must first separate to generate a replication “fork” for DNA polymerase to act on. Two types of replication proteins contribute to this process, DNA helicases and single-stranded binding proteins. DNA helicases hydrolyze ATP and use the energy of hydrolysis to separate the DNA strands. Single-stranded binding proteins (SSBs) then bind to the exposed DNA strands without covering the bases, thereby temporarily stabilizing them for templating by the DNA polymerase (Alberts, supra, pp. 255-256).

[0389] RNA helicases also alter and regulate RNA conformation and secondary structure. Like the DNA helicases, RNA helicases utilize energy derived from ATP hydrolysis to destabilize and unwind RNA duplexes. The most well characterized and ubiquitous family of RNA helicases is the DEAD-box family, so named for the conserved B-type ATP-binding motif which is diagnostic of proteins in this family. Over 40 DEAD-box helicases have been identified in organisms as diverse as bacteria, insects, yeast, amphibians, mammals, and plants. DEAD-box helicases function in diverse processes such as translation initiation, splicing, ribosome assembly, and RNA editing, transport, and stability. Some DEAD-box helicases play tissue- and stage-specific roles in spermatogenesis and embryogenesis. Overexpression of the DEAD-box 1 protein (DDX1) may play a role in the progression of neuroblastoma (Nb) and retinoblastoma (Rb) tumors (Godbout, R. et al. (1998) J. Biol. Chem. 273:21161-21168). These observations suggest that DDX1 may promote or enhance tumor progression by altering the normal secondary structure and expression levels of RNA in cancer cells. Other DEAD-box helicases have been implicated either directly or indirectly in tumorigenesis (Discussed in Godbout, supra). For example, murine p68 is mutated in ultraviolet light-induced tumors, and human DDX6 is located at a chromosomal breakpoint associated with B-cell lymphoma Similarly, a chimeric protein comprised of DDX10 and NUP98, a nucleoporin protein, may be involved in the pathogenesis of certain myeloid malignancies.

[0390] Topoisomerases

[0391] Besides the need to separate DNA strands prior to replication, the two strands must be “unwound” from one another prior to their separation by DNA helicases. This function is performed by proteins known as DNA topoisomerases. DNA topoisomerase effectively acts as a reversible nuclease that hydrolyzes a phosphodiesterase bond in a DNA strand, permitting the two strands to rotate freely about one another to remove the strain of the helix, and then rejoins the original phosphodiester bond between the two strands. Two types of DNA topoisomerase exist, types I and II. DNA Topoisomerase I causes a single-strand break in a DNA helix to allow the rotation of the two strands of the helix about the remaining phosphodiester bond in the opposite strand DNA topoisomerase II causes a transient break in both strands of a DNA helix where two double helices cross over one another. This type of topoisomerase can efficiently separate two interlocked DNA circles (Alberts, supra, pp.260-262). Type II topoisomerases are largely confined to proliferating cells in eukaryotes, such as cancer cells. For this reason they are targets for anticancer drugs. Topoisomerase II has been implicated in multi-drug resistance (MDR) as it appears to aid in the repair of DNA damage inflicted by DNA binding agents such as doxorubicin and vincristine.

[0392] Recombinases

[0393] Genetic recombination is the process of rearranging DNA sequences within an organism's genome to provide genetic variation for the organism in response to changes in the environment DNA recombination allows variation in the particular combination of genes present in an individual's genome, as well as the timing and level of expression of these genes (see Alberts, supra, pp. 263-273). Two broad classes of genetic recombination are commonly recognized, general recombination and site-specific recombination. General recombination involves genetic exchange between any homologous pair of DNA sequences usually located on two copies of the same chromosome. The process is aided by enzymes called recombinases that “nick” one strand of a DNA duplex more or less randomly and permit exchange with the complementary strand of another duplex. The process does not normally change the arrangement of genes on a chromosome. In site-specific recombination, the recombinase recognizes specific nucleotide sequences present in one or both of the recombining molecules. Base-pairing is not involved in this form of recombination and therefore does not require DNA homology between the recombining molecules. Unlike general recombination, this form of recombination can alter the relative positions of nucleotide sequences in chromosomes.

[0394] Splicing Factors

[0395] Various proteins are necessary for processing of transcribed RNAs in the nucleus. Pre-mRNA processing steps include capping at the 5′ end with methylguanosine, polyadenylating the 3′ end, and splicing to remove introns. The primary RNA transcript from DNA is a faithful copy of the gene containing both exon and intron sequences, and the latter sequences must be cut out of the RNA transcript to produce an mRNA that codes for a protein. This “splicing” of the mRNA sequence takes place in the nucleus with the aid of a large, multicomponent ribonucleoprotein complex known as a spliceosome. The spliceosomal complex is composed of five small nuclear ribonucleoprotein particles (snRNPs) designated U1, U2, U4, U5, and U6, and a number of additional proteins. Each snRNP contains a single species of snRNA and about ten proteins. The RNA components of some snRNPs recognize and base pair with intron consensus sequences. The protein components mediate spliceosome assembly and the splicing reaction. Autoantibodies to snRNP proteins are found in the blood of patients with systemic lupus erythematosus (Stryer, L. (1995) Biochemistry, W. H. Freeman and Company, New York N.Y., p. 863).

[0396] Adhesion Molecules

[0397] The surface of a cell is rich in transmembrane proteoglycans, glycoproteins, glycolipids, and receptors. These macromolecules mediate adhesion with other cells and with components of the extracellular matrix (ECM). The interaction of the cell with its surroundings profoundly influences cell shape, strength, flexibility, motility, and adhesion. These dynamic properties are intimately associated with signal transduction pathways controlling cell proliferation and differentiation, tissue construction, and embryonic development.

[0398] Cadherins

[0399] Cadherins comprise a family of calcium-dependent glycoproteins that function in mediating cell-cell adhesion in virtually all solid tissues of multicellular organisms. These proteins share multiple repeats of a cadherin-specific motif, and the repeats form the folding units of the cadherin extracellular domain. Cadherin molecules cooperate to form focal contacts, or adhesion plaques, between adjacent epithelial cells. The cadherin family includes the classical cadherins and protocadherins. Classical cadherins include the E-cadherin, N-cadherin, and P-cadherin subfamilies. E-cadherin is present on many types of epithelial cells and is especially important for embryonic development. N-cadherin is present on nerve, muscle, and lens cells and is also critical for embryonic development P-cadherin is present on cells of the placenta and epidermis. Recent studies report that protocadherins are involved in a variety of cell-cell interactions (Suzuki, S. T. (1996) J. Cell Sci. 109:2609-2611). The intracellular anchorage of cadherins is regulated by their dynamic association with catenins, a family of cytoplasmic signal transduction proteins associated with the actin cytoskeleton. The anchorage of cadherins to the actin cytoskeleton appears to be regulated by protein tyrosine phosphorylation, and the cadherins are the target of phosphorylation-induced junctional disassembly (Aberle, H. et al. (1996) J. Cell. Biochem. 61:514-523).

[0400] Integrins

[0401] Integrins are ubiquitous transmembrane adhesion molecules that link the ECM to the internal cytoskeleton. Integrins are composed of two noncovalently associated transmembrane glycoprotein subunits called α and β. Integrins function as receptors that play a role in signal transduction. For example, binding of integrin to its extracellular ligand may stimulate changes in intracellular calcium levels or protein kinase activity (Sjaastad, M. D. and W. J. Nelson (1997) BioEssays 19:47-55). At least ten cell surface receptors of the integrin family recognize the ECM component fibronectin, which is involved in many different biological processes including cell migration and embryogenesis (Johansson, S. et al. (1997) Front. Biosci. 2:D126-D146).

[0402] Lectins

[0403] Lectins comprise a ubiquitous family of extracellular glycoproteins which bind cell surface carbohydrates specifically and reversibly, resulting in the agglutination of cells (reviewed in Drickamer, K. and M. E. Taylor (1993) Annu. Rev. Cell Biol. 9:237-264). This function is particularly important for activation of the immune response. Lectins mediate the agglutination and mitogenic stimulation of lymphocytes at sites of inflammation (Lasky, L. A. (1991) J. Cell. Biochem. 45:139-146; Paietta, E. et al. (1989) J. Immunol. 143:2850-2857).

[0404] Lectins are further classified into subfamilies based on carbohydrate-binding specificity and other criteria. The galectin subfamily, in particular, includes lectins that bind β-galactoside carbohydrate moieties in a thio]-dependent manner (reviewed in Hadari, Y. R. et al. (1998) J. Biol. Chem. 270:3447-3453). Galectins are widely expressed and developmentally regulated. Because all galectins lack an N-terminal signal peptide, it is suggested that galectins are externalized through an a typical secretory mechanism. Two classes of galectins have been defined based on molecular weight and oligomerization properties. Small galectins form homodimers and are about 14 to 16 kilodaltons in mass, while large galectins are monomeric and about 29-37 kilodaltons.

[0405] Galectins contain a characteristic carbohydrate recognition domain (CRD). The CRD is about 140 amino acids and contains several stretches of about 1-10 amino acids which are highly conserved among all galectins. A particular 6-amino acid motif within the CRD contains conserved tryptophan and arginine residues which are critical for carbohydrate binding. The CRD of some galectins also contains cysteine residues which may be important for disulfide bond formation. Secondary structure predictions indicate that the CRD forms several β-sheets.

[0406] Galectins play a number of roles in diseases and conditions associated with cell-cell and cell-matrix interactions. For example, certain galectins associate with sites of inflammation and bind to cell surface immunoglobulin E molecules. In addition, galectins may play an important role in cancer metastasis. Galectin overexpression is correlated with the metastatic potential of cancers in humans and mice. Moreover, anti-galectin antibodies inhibit processes associated with cell transformation, such as cell aggregation and anchorage-independent growth (See, for example, Su, Z.-Z. et al. (1996) Proc. Natl. Acad. Sci. USA 93:7252-7257).

[0407] Selectins

[0408] Selectins, or LEC-CAMs, comprise a specialized lectin subfamily involved primarily in inflammation and leukocyte adhesion (Reviewed in Lasky, supra). Selectins mediate the recruitment of leukocytes from the circulation to sites of acute inflammation and are expressed on the surface of vascular endothelial cells in response to cytokine signaling. Selectins bind to specific ligands on the leukocyte cell membrane and enable the leukocyte to adhere to and migrate along the endothelial surface. Binding of selectin to its ligand leads to polarized rearrangement of the actin cytoskeleton and stimulates signal transduction within the leukocyte (Brenner, B. et al. (1997) Biochem. Biophys. Res. Commun 231:802-807;, Hidari, K. I. et al. (1997) J. Biol. Chem. 272:28750-28756). Members of the selectin family possess three characteristic motifs: a lectin or carbohydrate recognition domain; an epidermal growth factor-like domain; and a variable number of short consensus repeats (scr or “sushi” repeats) which are also present in complement regulatory proteins. The selectins include lymphocyte adhesion molecule-1 (Lam-1 or L-selectin), endothelial leukocyte adhesion molecule-1 (ELAM-1 or E-selectin), and granule membrane protein-140 (GMP-140 or P-selectin) (Johnston, G. I. et al. (1989) Cell 56:1033-1044).

[0409] Antigen Recognition Molecules

[0410] All vertebrates have developed sophisticated and complex immune systems that provide protection from viral, bacterial, fungal, and parasitic infections. A key feature of the immune system is its ability to distinguish foreign molecules, or antigens, from “self” molecules. This ability is mediated primarily by secreted and transmembrane proteins expressed by leukocytes (white blood cells) such as lymphocytes, granulocytes, and monocytes. Most of these proteins belong to the immunoglobulin (1 g) superfamily, members of which contain one or more repeats of a conserved structural domain. This Ig domain is comprised of antiparallel β sheets joined by a disulfide bond in an arrangement called the Ig fold. Members of the Ig superfamily include T-cell receptors, major histocompatibility (MHC) proteins, antibodies, and immune cell-specific surface markers such as CD4, CD8, and CD28.

[0411] MHC proteins are cell surface markers that bind to and present foreign antigens to T cells. MHC molecules are classified as either class I or class II. Class I MHC molecules (MHC I) are expressed on the surface of almost all cells and are involved in the presentation of antigen to cytotoxic T cells. For example, a cell infected with virus will degrade intracellular viral proteins and express the protein fragments bound to MHC I molecules on the cell surface. The MHC 1/antigen complex is recognized by cytotoxic T-cells which destroy the infected cell and the virus within Class II MHC molecules are expressed primarily on specialized antigen-presenting cells of the immune system, such as B-cells and macrophages. These cells ingest foreign proteins from the extracellular fluid and express MHC II/antigen complex on the cell surface. This complex activates helper T-cells, which then secrete cytokines and other factors that stimulate the immune response. MHC molecules also play an important role in organ rejection following transplantation. Rejection occurs when the recipient's T-cells respond to foreign MHC molecules on the transplanted organ in the same way as to self MHC molecules bound to foreign antigen. (Reviewed in Alberts, B. et al. (1994) Molecular Biology of the Cell, Garland Publishing, New York N.Y., pp. 1229-1246.)

[0412] Antibodies, or immunoglobulins, are either expressed on the surface of B-cells or secreted by B-cells into the circulation. Antibodies bind and neutralize foreign antigens in the blood and other extracellular fluids. The prototypical antibody is a tetramer consisting of two identical heavy polypeptide chains (H-chains) and two identical light polypeptide chains (L-chains) interlinked by disulfide bonds. This arrangement confers the characteristic Y-shape to antibody molecules. Antibodies are classified based on their H-chain composition. The five antibody classes, IgA, IgD, IgE, IgG and IgM, are defined by the α, δ, ε, γ, and μ H-chain types. There are two types of L-chains, κ and λ, either of which may associate as a pair with any H-chain pair. IgG, the most common class of antibody found in the circulation, is tetrameric, while the other classes of antibodies are generally variants or multimers of this basic structure.

[0413] H-chains and L-chains each contain an N-terminal variable region and a C-terminal constant region. The constant region consists of about 110 amino acids in L-chains and about 330 or 440 amino acids in H-chains. The amino acid sequence of the constant region is nearly identical among H- or L-chains of a particular class. The variable region consists of about 110 amino acids in both H- and L-chains. However, the amino acid sequence of the variable region differs among H- or L-chains of a particular class. Within each H- or L-chain variable region are three hypervariable regions of extensive sequence diversity, each consisting of about 5 to 10 amino acids. In the antibody molecule, the H- and L-chain hypervariable regions come together to form the antigen recognition site. (Reviewed in Alberts, supra, pp. 1206-1213 and 1216-1217.)

[0414] Both H-chains and L-chains contain repeated Ig domains. For example, a typical H-chain contains four Ig domains, three of which occur within the constant region and one of which occurs within the variable region and contributes to the formation of the antigen recognition site. Likewise, a typical L-chain contains two Ig domains, one of which occurs within the constant region and one of which occurs within the variable region.

[0415] The immune system is capable of recognizing and responding to any foreign molecule that enters the body. Therefore, the immune system must be armed with a full repertoire of antibodies against all potential antigens. Such antibody diversity is generated by somatic rearrangement of gene segments encoding variable and constant regions. These gene segments are joined together by site-specific recombination which occurs between highly conserved DNA sequences that flank each gene segment. Because there are hundreds of different gene segments, millions of unique genes can be generated combinatorially. In addition, imprecise joining of these segments and an unusually high rate of somatic mutation within these segments further contribute to the generation of a diverse antibody population.

[0416] T-cell receptors are both structurally and functionally related to antibodies. (Reviewed in Alberts, supra, pp. 1228-1229.) T-cell receptors are cell surface proteins that bind foreign antigens and mediate diverse aspects of the immune response. A typical T-cell receptor is a heterodimer comprised of two disulfide-linked polypeptide chains called α and β. Each chain is about 280 amino acids in length and contains one variable region and one constant region. Each variable or constant region folds into an Ig domain. The variable regions from the α and β chains come together in the heterodimer to form the antigen recognition site. Tell receptor diversity is generated by somatic rearrangement of gene segments encoding the α and β chains. TV receptors recognize small peptide antigens that are expressed on the surface of antigen-presenting cells and pathogen-infected cells. These peptide antigens are presented on the cell surface in association with major histocompatibility proteins which provide the proper context for antigen recognition.

[0417] Secreted and Extracellular Matrix Molecules

[0418] Protein secretion is essential for cellular function. Protein secretion is mediated by a signal peptide located at the amino terminus of the protein to be secreted. The signal peptide is comprised of about ten to twenty hydrophobic amino acids which target the nascent protein from the ribosome to the endoplasmic reticulum (ER). Proteins targeted to the ER may either proceed through the secretory pathway or remain in any of the secretory organelles such as the ER, Golgi apparatus, or lysosomes.

[0419] Proteins that transit through the secretory pathway are either secreted into the extracellular space or retained in the plasma membrane. Secreted proteins are often synthesized as inactive precursors that are activated by post-translational processing events during transit through the secretory pathway. Such events include glycosylation, proteolysis, and removal of the signal peptide by a signal peptidase. Other events that may occur during protein transport include chaperone-dependent unfolding and folding of the nascent protein and interaction of the protein with a receptor or pore complex. Examples of secreted proteins with amino terminal signal peptides include receptors, extracellular matrix molecules, cytokines, hormones, growth and differentiation factors, neuropeptides, vasomediators, ion channels, transporters/pumps, and proteases. (Reviewed in Alberts, B. et al. (1994) Molecular Biology of The Cell, Garland Publishing, New York N.Y., pp. 557-560, 582-592.)

[0420] The extracellular matrix (EC) is a complex network of glycoproteins, polysaccharides, proteoglycans, and other macromolecules that are secreted from the cell into the extracellular space. The ECM remains in close association with the cell surface and provides a supportive meshwork that profoundly influences cell shape, motility, strength, flexibility, and adhesion. In fact, adhesion of a cell to its surrounding matrix is required for cell survival except in the case of metastatic tumor cells, which have overcome the need for cell-ECM anchorage. This phenomenon suggests that the ECM plays a critical role in the molecular mechanisms of growth control and metastasis. (Reviewed in Ruoslahti, E. (1996) Sci. Am 275:72-77.) Furthermore, the ECM determines the structure and physical properties of connective tissue and is particularly important for morphogenesis and other processes associated with embryonic development and pattern formation.

[0421] The collagens comprise a family of ECM proteins that provide structure to bone, teeth, skin, ligaments, tendons, cartilage, blood vessels, and basement membranes. Multiple collagen proteins have been identified. Three collagen molecules fold together in a triple helix stabilized by interchain disulfide bonds. Bundles of these triple helices then associate to form fibrils. Collagen primary structure consists of hundreds of (Gly-X-Y) repeats where about a third of the X and Y residues are Pro. Glycines are crucial to helix formation as the bulkier amino acid sidechains cannot fold into the triple helical conformation. Because of these strict sequence requirements, mutations in collagen genes have severe consequences. Osteogenesis imperfecta patients have brittle bones that fracture easily; in severe cases patients die in utero or at birth Ehlers-Danlos syndrome patients have hyperelastic skin, hypermobile joints, and susceptibility to aortic and intestinal rupture. Chondrodysplasia patients have short stature and ocular disorders. Alport syndrome patients have hematuria, sensorineural deafness, and eye lens deformation. (Isselbacher, K. J. et al. (1994) Harrison's Principles of Internal Medicine, McGraw-Hill, Inc., New York N.Y., pp. 2105-2117; and Creighton, T. E. (1984) Proteins. Structures and Molecular Principles, W. H. Freeman and Company, New York N.Y., pp. 191-197.)

[0422] Elastin and related proteins confer elasticity to tissues such as skin, blood vessels, and lungs. Elastin is a highly hydrophobic protein of about 750 amino acids that is rich in proline and glycine residues. Elastin molecules are highly cross-linked, forming an extensive extracellular network of fibers and sheets. Elastin fibers are surrounded by a sheath of microfibrils which are composed of a number of glycoproteins, including fibrillin. Mutations in the gene encoding fibrillin are responsible for Marfan's syndrome, a genetic disorder characterized by defects in connective tissue. In severe cases, the aortas of afflicted individuals are prone to rupture. (Reviewed in Alberts, supra, pp. 984-986.)

[0423] Fibronectin is a large ECM glycoprotein found in all vertebrates. Fibronectin exists as a dimer of two subunits, each containing about 2,500 amino acids. Each subunit folds into a rod-like structure containing multiple domains. The domains each contain multiple repeated modules, the most common of which is the type III fibronectin repeat. The type III fibronectin repeat is about 90 amino acids in length and is also found in other ECM proteins and in some plasma membrane and cytoplasmic proteins. Furthermore, some type III fibronectin repeats contain a characteristic tripeptide consisting of Arginine-Glycine-Aspartic acid (RGD). The RGD sequence is recognized by the integrin family of cell surface receptors and is also found in other ECM proteins. Disruption of both copies of the gene encoding fibronectin causes early embryonic lethality in mice. The mutant embryos display extensive morphological defects, including defects in the formation of the notochord, somites, heart, blood vessels, neural tube, and extraembryonic structures. (Reviewed in Alberts, supra, pp. 986-987.)

[0424] Laminin is a major glycoprotein component of the basal lamina which underlies and supports epithelial cell sheets. Laminin is one of the first ECM proteins synthesized in the developing embryo. Laminin is an 850 kilodalton protein composed of three polypeptide chains joined in the shape of a cross by disulfide bonds. Laminin is especially important for angiogenesis and in particular, for guiding the formation of capillaries. (Reviewed in Alberts, supra, pp. 990-991.)

[0425] There are many other types of proteinaceous ECM components, most of which can be classified as proteoglycans. Proteoglycans are composed of unbranched polysaccharide chains (glycosaminoglycans) attached to protein cores. Common proteoglycans include aggrecan, betaglycan, decorin, perlecan, serglycin, and syndecan-1. Some of these molecules not only provide mechanical support, but also bind to extracellular signaling molecules, such as fibroblast growth factor and transforming growth factor β, suggesting a role for proteoglycans in cell-cell communication and cell growth (Reviewed in Alberts, supra, pp. 973-978.) Likewise, the glycoproteins tenascin-C and tenascin-R are expressed in developing and lesioned neural tissue and provide stimulatory and anti-adhesive (inhibitory) properties, respectively, for axonal growth (Faissner, A (1997) Cell Tissue Res. 290:331-341.)

[0426] Cytoskeletal Molecules

[0427] The cytoskeleton is a cytoplasmic network of protein fibers that mediate cell shape, structure, and movement. The cytoskeleton supports the cell membrane and forms tracks along which organelles and other elements move in the cytosol. The cytoskeleton is a dynamic structure that allows cells to adopt various shapes and to carry out directed movements. Major cytoskeletal fibers include the microtubules, the microfilaments, and the intermediate filaments. Motor proteins, including myosin, dynein, and kinesin, drive movement of or along the fibers. The motor protein dynamin drives the formation of membrane vesicles. Accessory or associated proteins modify the structure or activity of the fibers while cytoskeletal membrane anchors connect the fibers to the cell membrane.

[0428] Tubulins

[0429] Microtubules, cytoskeletal fibers with a diameter of about 24 nm, have multiple roles in the cell. Bundles of microtubules form cilia and flagella, which are whip-like extensions of the cell membrane that are necessary for sweeping materials across an epithelium and for swimming of sperm, respectively. Marginal bands of microtubules in red blood cells and platelets are important for these cells' pliability. Organelles, membrane vesicles, and proteins are transported in the cell along tracks of microtubules. For example, microtubules run through nerve cell axons, allowing bi-directional transport of materials and membrane vesicles between the cell body and the nerve terminal. Failure to supply the nerve terminal with these vesicles blocks the transmission of neural signals. Microtubules are also critical to chromosomal movement during cell division. Both stable and short-lived populations of microtubules exist in the cell.

[0430] Microtubules are polymers of GTP-binding tubulin protein subunits. Each subunit is a heterodimer of α- and β-tubulin, multiple isoforms of which exist The hydrolysis of GTP is linked to the addition of tubulin subunits at the end of a microtubule. The subunits interact head to tail to form protofilaments; the protofilaments interact side to side to form a microtubule. A microtubule is polarized, one end ringed with α-tubulin and the other with β-tubulin, and the two ends differ in their rates of assembly. Generally, each microtubule is composed of 13 protofilaments although 11 or 15 protofilament-microtubules are sometimes found. Cilia and flagella contain doublet microtubules. Microtubules grow from specialized structures known as centrosomes or microtubule-organizing centers (MTOCs). MTOCs may contain one or two centrioles, which are pinwheel arrays of triplet microtubules. The basal body, the organizing center located at the base of a cilium or flagellum, contains one centriole. Gamma tubulin present in the MTOC is important for nucleating the polymerization of α- and β-tubulin heterodimers but does not polymerize into microtubules.

[0431] Microtubule-Associated Proteins

[0432] Microtubule-associated proteins (MAPs) have roles in the assembly and stabilization of microtubules. One major family of MAPs, assembly MAPs, can be identified in neurons as well as non-neuronal cells. Assembly MAPs are responsible for cross-linking microtubules in the cytosol These MAPs are organized into two domains: a basic microtubule-binding domain and an acidic projection domain. The projection domain is the binding site for membranes, intermediate filaments, or other microtubules. Based on sequence analysis, assembly MAPs can be further grouped into two types: Type I and Type II. Type I MAPs, which include MAP1A and MAP1B, are large, filamentous molecules that co-purify with microtubules and are abundantly expressed in brain and testes. Type I MAPs contain several repeats of a positively-charged amino acid sequence motif that binds and neutralizes negatively charged tubulin, leading to stabilization of microtubules. MAP1A and MAP1B are each derived from a single precursor polypeptide that is subsequently proteolytically processed to generate one heavy chain and one light chain

[0433] Another light chain, LC3, is a 16.4 kDa molecule that binds MAP1A, MAP1B, and microtubules. It is suggested that LC3 is synthesized from a source other than the MAP1A or MAP1B transcripts, and that the expression of LC3 may be important in regulating the microtubule binding activity of MAP1A and MAP1B during cell proliferation (Mann, S. S. et al. (1994) J. Biol. Chem. 269:11492-11497).

[0434] Type II MAPs, which include MAP2a, MAP2b, MAP2c, MAP4, and Tau, are characterized by three to four copies of an 18-residue sequence in the microtubule-binding domain MAP2a, MAP2b, and MAP2c are found only in dendrites, MAP4 is found in non-neuronal cells, and Tau is found in axons and dendrites of nerve cells. Alternative splicing of the Tau mRNA leads to the existence of multiple forms of Tau protein. Tau phosphorylation is altered in neurodegenerative disorders such as Alzheimer's disease, Pick's disease, progressive supranuclear palsy, corticobasal degeneration, and familial frontotemporal dementia and Parkinsonism linked to chromosome 17. The altered Tau phosphorylation leads to a collapse of the microtubule network and the formation of intraneuronal Tau aggregates (Spillantini, M. G. and M. Goedert (1998) Trends Neurosci. 21:428-433).

[0435] The protein pericentrin is found in the MTOC and has a role in microtubule assembly.

[0436] Actins

[0437] Microfilaments, cytoskeletal filaments with a diameter of about 7-9 nm, are vital to cell locomotion, cell shape, cell adhesion, cell division, and muscle contraction. Assembly and disassembly of the microfilaments allow cells to change their morphology. Microfilaments are the polymerized form of actin, the most abundant intracellular protein in the eukaryotic cell. Human cells contain six isoforms of actin. The three α-actins are found in different kinds of muscle, nonmuscle, β-actin and nonmuscle γ-actin are found in nonmuscle cells, and another y-actin is found in intestinal smooth muscle cells. G-actin, the monomeric form of actin, polymerizes into polarized, helical F-actin filaments, accompanied by the hydrolysis of ATP to ADP. Actin filaments associate to form bundles and networks, providing a framework to support the plasma membrane and determine cell shape. These bundles and networks are connected to the cell membrane. In muscle cells, thin filaments containing actin slide past thick filaments containing the motor protein myosin during contraction. A family of actin-related proteins exist that are not part of the actin cytoskeleton, but rather associate with microtubules and dynein.

[0438] Actin-Associated Proteins

[0439] Actin-associated proteins have roles in cross-linking, severing, and stabilization of actin filaments and in sequestering actin monomers. Several of the actin-associated proteins have multiple functions. Bundles and networks of actin filaments are held together by actin cross-lining proteins. These proteins have two actin-binding sites, one for each filament. Short cross-lining proteins promote bundle formation while longer, more flexible cross-linking proteins promote network formation. Calmodulin-like calcium-binding domains in actin cross-linking proteins allow calcium regulation of cross-linking. Group I cross-linking proteins have unique actin-binding domains and include the 30 kD protein, EF-1a, fascin, and scruin. Group II cross-lining proteins have a 7,000-MW actin-binding domain and include villin and dematin. Group III cross-lining proteins have pairs of a 26,000-MW actin-binding domain and include fimbrin, spectrin, dystrophin, ABP 120, and filamin

[0440] Severing proteins regulate the length of actin filaments by breaking them into short pieces or by blocking their ends. Severing proteins include gCAP39, severin (fragmin), gelsolin, and villin. Capping proteins can cap the ends of actin filaments, but cannot break filaments. Capping proteins include CapZ and tropomodulin. The proteins thymosin and profilin sequester actin monomers in the cytosol, allowing a pool of unpolymerized actin to exist. The actin-associated proteins tropomyosin, troponin, and caldesmon regulate muscle contraction in response to calcium.

[0441] Intermediate Filaments and Associated Proteins

[0442] Intermediate filaments (IFs) are cytoskeletal fibers with a diameter of about 10 nm, intermediate between that of microfilaments and microtubules. IFs serve structural roles in the cell, reinforcing cells and organizing cells into tissues. IFs are particularly abundant in epidermal cells and in neurons. IFs are extremely stable, and, in contrast to microfilaments and microtubules, do not function in cell motility.

[0443] Five types of IF proteins are known in mammals. Type I and Type II proteins are the acidic and basic keratins, respectively. Heterodimers of the acidic and basic keratins are the building blocks of keratin IFs. Keratins are abundant in soft epithelia such as skin and cornea, hard epithelia such as nails and hair, and in epithelia that line internal body cavities. Mutations in keratin genes lead to epithelial diseases including epidermolysis bullosa simplex, bullous congenital ichthyosiform erytroderma (epidermolytic hyperkeratosis), non-epidermolytic and epidermolytic palmoplantar keratodenna, ichthyosis bullosa of Siemens, pachyonychia congenita, and white sponge nevus. Some of these diseases result in severe skin blistering. (See, e.g., Wawersik, M. et al. (1997) J. Biol. Chem. 272:32557-32565; and Corden L. D. and W. H. McLean (1996) Exp. Dermatol. 5:297-307.)

[0444] Type III IF proteins include desmin, glial fibrillary acidic protein, vimentin, and peipherin. Desmin filaments in muscle cells link myofibrils into bundles and stabilize sarcomeres in contracting muscle. Glial fibrillary acidic protein filaments are found in the glial cells that surround neurons and astrocytes. Vimentin filaments are found in blood vessel endothelial cells, some epithelial cells, and mesenchymal cells such as fibroblasts, and are commonly associated with microtubules. Vimentin filaments may have roles in keeping the nucleus and other organelles in place in the cell. Type IV IFs include the neurofilaments and nestin. Neurofilaments, composed of three polypeptides NF-L, NF-M, and NF-H, are frequently associated with microtubules in axons. Neurofilaments are responsible for the radial growth and diameter of an axon, and ultimately for the speed of nerve impulse transmission. Changes in phosphorylation and metabolism of neurofilaments are observed in neurodegenerative diseases including amyotrophic lateral sclerosis, Parkinson's disease, and Alzheimer's disease (Julien, J. P. and W. E. Mushynski (1998) Prog. Nucleic Acid Res. Mol. Biol. 61:1-23). Type V IFs, the lamins, are found in the nucleus where they support the nuclear membrane.

[0445] IFs have a central α-helical rod region interrupted by short nonhelical linker segments. The rod region is bracketed, in most cases, by non-helical head and tail domains. The rod regions of intermediate filament proteins associate to form a coiled-coil dimer. A highly ordered assembly process leads from the dimers to the IFs. Neither ATP nor GTP is needed for IF assembly, unlike that of microfilaments and microtubules.

[0446] IF-associated proteins (IFAPs) mediate the interactions of IFs with one another and with other cell structures. IFAPs cross-link IFs into a bundle, into a network, or to the plasma membrane, and may cross-link IFs to the microfilament and microtubule cytoskeleton. Microtubules and IFs are in particular closely associated. IFAPs include BPAG1, plakoglobin, desmoplakin I, desmoplakin II, plectin, ankyrin, filaggrin, and lamin B receptor.

[0447] Cytoskeletal-Membrane Anchors

[0448] Cytoskeletal fibers are attached to the plasma membrane by specific proteins. These attachments are important for maintaining cell shape and for muscle contraction. In erythrocytes, the spectrin-actin cytoskeleton is attached to cell membrane by three proteins, band 4.1, ankyrin, and adducin. Defects in this attachment result in abnormally shaped cells which are more rapidly degraded by the spleen, leading to anemia. In platelets, the spectrin-actin cytoskeleton is also linked to the membrane by ankyrin; a second actin network is anchored to the membrane by filamin In muscle cells the protein dystrophin links actin filaments to the plasma membrane; mutations in the dystrophin gene lead to Duchenne muscular dystrophy. In adherens junctions and adhesion plaques the peripheral membrane proteins α-actin and vinculin attach actin filaments to the cell membrane.

[0449] IFs are also attached to membranes by cytoskeletal-membrane anchors. The nuclear lamina is attached to the inner surface of the nuclear membrane by the lamin B receptor. Vimentin IFs are attached to the plasma membrane by ankyrin and plectin. Desmosome and hemidesmosome membrane junctions hold together epithelial cells of organs and skin. These membrane junctions allow shear forces to be distributed across the entire epithelial cell layer, thus providing strength and rigidity to the epithelium. IFs in epithelial cells are attached to the desmosome by plakoglobin and desmoplakins. The proteins that link IFs to hemidesmosomes are not known. Desmin IFs surround the sarcomere in muscle and are linked to the plasma membrane by paranemin, synemin, and ankyrin.

[0450] Myosin-related Motor Proteins

[0451] Myosins are actin-activated ATPases, found in eukaryotic cells, that couple hydrolysis of ATP with motion. Myosin provides the motor function for muscle contraction and intracellular movements such as phagocytosis and rearrangement of cell contents during mitotic cell division (cytokinesis). The contractile unit of skeletal muscle, termed the sarcomere, consists of highly ordered arrays of thin actin-containing filaments and thick myosin-containing filaments. Crossbridges form between the thick and thin filaments, and the ATP-dependent movement of myosin heads within the thick filaments pulls the thin filaments, shortening the sarcomere and thus the muscle fiber.

[0452] Myosins are composed of one or two heavy chains and associated light chains. Myosin heavy chains contain an amino-terminal motor or head domain, a neck that is the site of light-chain binding, and a carboxy-terminal tail domain. The tail domains may associate to form an α-helical coiled coil. Conventional myosins, such as those found in muscle tissue, are composed of two myosin heavy-chain subunits, each associated with two light-chain subunits that bind at the neck region and play a regulatory role. Unconventional myosins, believed to function in intracellular motion, may contain either one or two heavy chains and associated light chains. There is evidence for about 25 myosin heavy chain genes in vertebrates, more than half of them unconventional.

[0453] Dynein-related Motor Proteins

[0454] Dyneins are (−) end-directed motor proteins which act on microtubules. Two classes of dyneins, cytosolic and axonemal, have been identified. Cytosolic dyneins are responsible for translocation of materials along cytoplasmic microtubules, for example, transport from the nerve terminal to the cell body and transport of endocytic vesicles to lysosomes. Cytoplasmic dyneins are also reported to play a role in mitosis. Axonemal dyneins are responsible for the beating of flagella and cilia. Dynein on one microtubule doublet walks along the adjacent microtubule doublet This sliding force produces bending forces that cause the flagellum or cilium to beat Dyneins have a native mass between 1000 and 2000 kDa and contain either two or three force-producing heads driven by the hydrolysis of ATP. The heads are linked via stalks to a basal domain which is composed of a highly variable number of accessory intermediate and light chains.

[0455] Kinesin-related Motor Proteins

[0456] Kinesins are (+) end-directed motor proteins which act on microtubules. The prototypical kinesin molecule is involved in the transport of membrane-bound vesicles and organelles. This function is particularly important for axonal transport in neurons. Kinesin is also important in all cell types for the transport of vesicles from the Golgi complex to the endoplasmic reticulum. This role is critical for maintaining the identity and functionality of these secretory organelles.

[0457] Kinesins define a ubiquitous, conserved family of over 50 proteins that can be classified into at least 8 subfamilies based on primary amino acid sequence, domain structure, velocity of movement, and cellular function. (Reviewed in Moore, J. D. and S. A. Endow (1996) Bioessays 18:207-219; and Hoyt, A. M. (1994) Curr. Opin. Cell Biol. 6:63-68.) The prototypical kinesin molecule is a heterotetramer comprised of two heavy polypeptide chains (KHCs) and two light polypeptide chains (KLCs). The KHC subunits are typically referred to as “kinesin.” KHC is about 1000 amino acids in length, and KLC is about 550 amino acids in length Two KHCs dimerize to form a rod-shaped molecule with three distinct regions of secondary structure. At one end of the molecule is a globular motor domain that functions in ATP hydrolysis and microtubule binding. Kinesin motor domains are highly conserved and share over 70% identity. Beyond the motor domain is an α-helical coiled-coil region which mediates dimerization. At the other end of the molecule is a fan-shaped tail that associates with molecular cargo. The tail is formed by the interaction of the KHC C-termini with the two KLCs.

[0458] Members of the more divergent subfamilies of kinesins are called kinesin-related proteins (KRPs), many of which function during mitosis in eukaryotes (Hoyt, supra). Some KRPs are required for assembly of the mitotic spindle. In vivo and in vitro analyses suggest that these KRPs exert force on microtubules that comprise the mitotic spindle, resulting in the separation of spindle poles. Phosphorylation of KRP is required for this activity. Failure to assemble the mitotic spindle results in abortive mitosis and chromosomal aneuploidy, the latter condition being characteristic of cancer cells. In addition, a unique KRP, centromere protein E, localizes to the kinetochore of human mitotic chromosomes and may play a role in their segregation to opposite spindle poles.

[0459] Dynamin-related Motor Proteins

[0460] Dynamin is a large GTPase motor protein that functions as a “molecular pinchase,” generating a mechanochemical force used to sever membranes. This activity is important in forming clathrin-coated vesicles from coated pits in endocytosis and in the biogenesis of synaptic vesicles in neurons. Binding of dynamin to a membrane leads to dynamin's self-assembly into spirals that may act to constrict a flat membrane surface into a tubule. GTP hydrolysis induces a change in conformation of the dynamin polymer that pinches the membrane tubule, leading to severing of the membrane tubule and formation of a membrane vesicle. Release of GDP and inorganic phosphate leads to dynamin disassembly. Following disassembly the dynamin may either dissociate from the membrane or remain associated to the vesicle and be transported to another region of the cell. Three homologous dynamin genes have been discovered, in addition to several dynamin-related proteins. Conserved dynamin regions are the N-terminal GTP-binding domain, a central pleckstrin homology domain that binds membranes, a central coiled-coil region that may activate dynamin's GTPase activity, and a C-terminal proline-rich domain that contains several motifs that bind SH3 domains on other proteins. Some dynamin-related proteins do not contain the pleckstrin homology domain or the proline-rich domain. (See McNiven, M. A. (1998) Cell 94:151-154; Scaife, R. N. and R. L. Margolis (1997) Cell. Signal. 9:395401.)

[0461] The cytoskeleton is reviewed in Lodish, H. et al. (1995) Molecular Cell Biology, Scientific American Books, New York N.Y.

[0462] Ribosomal Molecules

[0463] Ribosomal RNAs (rRNAs) are assembled, along with ribosomal proteins, into ribosomes, which are cytoplasmic particles that translate messenger RNA into polypeptides. The eukaryotic ribosome is composed of a 60S (large) subunit and a 40S (small) subunit, which together form the 80S ribosome. In addition to the 18S, 28S, 5S, and 5.8S rRNAs, the ribosome also contains more than fifty proteins. The ribosomal proteins have a prefix which denotes the subunit to which they belong, either L (large) or S (small). Ribosomal protein activities include binding rRNA and organizing the conformation of the junctions between rRNA helices (Woodson, S. A. and N. B. Leontis (1998) Curr. Opin. Stuct. Biol. 8:294-300; Ramakrishnan, V. and S. W. White (1998) Trends Biochem. Sci. 23:208-212.) Three important sites are identified on the ribosome. The aminoacyl-tRNA site (A site) is where charged tRNAs (with the exception of the initiator-tRNA) bind on arrival at the ribosome. The peptidyl-tRNA site (P site) is where new peptide bonds are formed, as well as where the initiator tRNA binds. The exit site E site) is where deacylated tRNAs bind prior to their release from the ribosome. (The ribosome is reviewed in Stryer, L. (1995) Biochemistry W. H. Freeman and Company, New York N. Y., pp. 888-908; and Lodish, H. et al. (1995) Molecular Cell Biology Scientific American Books, New York N.Y. pp. 119-138.)

[0464] Chromatin Molecules

[0465] The nuclear DNA of eukaryotes is organized into chromatin. Two types of chromatin are observed: euchromatin, some of which may be transcribed, and heterochromatin so densely packed that much of it is inaccessible to transcription. Chromatin packing thus serves to regulate protein expression in eukaryotes. Bacteria lack chromatin and the chromatin-packing level of gene regulation. The fundamental unit of chromatin is the nucleosome of 200 DNA base pairs associated with two copies each of histones H2A, H2B, H3, and H4. Adjascent nucleosomes are linked by another class of histones, H1. Low molecular weight non-histone proteins called the high mobility group (ERG), associated with chromatin, may function in the unwinding of DNA and stabilization of single-stranded DNA. Chromodomain proteins function in compaction of chromatin into its transcriptionally silent heterochromatin form.

[0466] During mitosis, all DNA is compacted into heterochromatin and transcription ceases. Transcription in interphase begins with the activation of a region of chromatin Active chromatin is decondensed. Decondensation appears to be accompanied by changes in binding coefficient, phosphorylation and acetylation states of chromatin histones. HMG proteins HMG13 and HMG17 selectively bind activated chromatin. Topoisomerases remove superheilcal tension on DNA The activated region decondenses, allowing gene regulatory proteins and transcription factors to assemble on the DNA.

[0467] Patterns of chromatin structure can be stably inherited, producing heritable patterns of gene expression. In mammals, one of the two X chromosomes in each female cell is inactivated by condensation to heterochromatin during zygote development. The inactive state of this chromosome is inherited, so that adult females are mosaics of clusters of paternal-X and maternal-X clonal cell groups. The condensed X chromosome is reactivated in meiosis.

[0468] Chromatin is associated with disorders of protein expression such as thalassemia, a genetic anemia resulting from the removal of the locus control region (LCR) required for decondensation of the globin gene locus.

[0469] For a review of chromatin structure and function see Alberts, B. et al. (1994) Molecular Cell Biology, third edition, Garland Publishing, Inc., New York N.Y., pp. 351-354, 433-439.

[0470] Electron Transfer Associated Molecules

[0471] Electron carriers such as cytochromes accept electrons from NADH or FADH₂ and donate them to other electron carriers. Most electron-transferring proteins, except ubiquinone, are prosthetic groups such as flavins, heme, FeS clusters, and copper, bound to inner membrane proteins. Adrenodoxin, for example, is an FeS protein that forms a complex with NADPH:adrenodoxin reductase and cytochrome p450. Cytochromes contain a heme prosthetic group, a porphyrin ring containing a tightly bound iron atom. Electron transfer reactions play a crucial role in cellular energy production.

[0472] Energy is produced by the oxidation of glucose and fatty acids. Glucose is initially converted to pyruvate in the cytoplasm. Fatty acids and pyruvate are transported to the mitochondria for complete oxidation to CO₂ coupled by enzymes to the transport of electrons from NADH and FADH₂ to oxygen and to the synthesis of ATP (oxidative phosphorylation) from ADP and Pᵢ.

[0473] Pyruvate is transported into the mitochondria and converted to acetyl-CoA for oxidation via the citric acid cycle, involving pyruvate dehydrogenase components, dihydrolipoyl transacetylase, and dihydrolipoyl dehydrogenase. Enzymes involved in the citric acid cycle include: citrate synthetase, aconitases, isocitrate dehydrogenase, alpha-ketoglutarate dehydrogenase complex including transsuccinylases, succinyl CoA synthetase, succinate dehydrogenase, fumarases, and malate dehydrogenase. Acetyl CoA is oxidized to CO₂ with concomitant formation of NADH, FADH₂, and GTP. In oxidative phosphorylation, the transfer of electrons from NADH and FADH₂ to oxygen by dehydrogenases is coupled to the synthesis of ATP from ADP and Pᵢ by the F₀F₁ ATPase complex in is the mitochondrial inner membrane. Enzyme complexes responsible for electron transport and ATP synthesis include the F₀F₁ ATPase complex, ubiquinone(CoQ)-cytocbrome c reductase, ubiquinone reductase, cytochrome b, cytocbrome c₁, FeS protein, and cytochrome c oxidase.

[0474] ATP synthesis requires membrane transport enzymes including the phosphate transporter and the ATP-ADP antiport protein. The ATP-binding casette (ABC) superfamily has also been suggested as belonging to the mitochondrial transport group (Hogue, D. L. et al. (1999) J. Mol. Biol. 285:379-389). Brown fat uncoupling protein dissipates oxidative energy as heat, and may be involved the fever response to infection and trauma (Cannon, B. et al. (1998) Ann. NY Acad. Sci. 856:171-187).

[0475] Mitochondria are oval-shaped organelles comprising an outer membrane, a tightly folded inner membrane, an intermembrane space between the outer and inner membranes, and a matrix inside the inner membrane. The outer membrane contains many porin molecules that allow ions and charged molecules to enter the intermembrane space, while the inner membrane contains a variety of transport proteins that transfer only selected molecules. Mitochondria are the primary sites of energy production in cells.

[0476] Mitochondria contain a small amount of DNA. Human mitochondrial DNA encodes 13 proteins, 22 tRNAs, and 2 rRNAs. Mitochondrial-DNA encoded proteins include NADH-Q reductase, a cytochrome reductase subunit, cytochrome oxidase subunits, and ATP synthase subunits.

[0477] Electron-transfer reactions also occur outside the mitochondria in locations such as the endoplasmic reticulum, which plays a crucial role in lipid and protein biosynthesis. Cytochrome b5 is a central electron donor for various reductive reactions occurring on the cytoplasmic surface of liver endoplasmic reticulum. Cytochrome b5 has been found in Golgi, plasma, endoplasmic reticulum (ER), and microbody membranes.

[0478] For a review of mitochondrial metabolism and regulation, see Lodish, H. et al. (1995) Molecular Cell Biology, Scientific American Books, New York N.Y., pp. 745-797 and Stryer (1995) Biochemistry, W. H. Freeman and Co., San Francisco Calif., pp 529-558, 988-989.

[0479] The majority of mitochondrial proteins are encoded by nuclear genes, are synthesized on cytosolic ribosomes, and are imported into the mitochondria. Nuclear-encoded proteins which are destined for the mitochondrial matrix typically contain positively-charged amino terminal signal sequences. Import of these preproteins from the cytoplasm requires a multisubunit protein complex in the outer membrane known as the translocase of outer mitochondrial membrane (TOM; previously designated MOM; Pfanner, N. et al. (1996) Trends Biochem. Sci. 21:51-52) and at least three inner membrane proteins which comprise the translocase of inner mitochondrial membrane (TIM; previously designated MIM; Pfanner, supra). An inside-negative membrane potential across the inner mitochondrial membrane is also required for preprotein import. Preproteins are recognized by surface receptor components of the TOM complex and are translocated through a proteinaceous pore formed by other TOM components. Proteins targeted to the matrix are then recognized by the import machinery of the TIM complex. The import systems of the outer and inner membranes can function independently (Segui-Real, B. et al. (1993) EMBO J. 12:2211-2218).

[0480] Once precursor proteins are in the mitochondria, the leader peptide is cleaved by a signal peptidase to generate the mature protein. Most leader peptides are removed in a one step process by a protease termed mitochondrial processing peptidase (MPP) (Paces, V. et al. (1993) Proc. Natl. Acad. Sci. USA 90:5355-5358). In some cases a two-step process occurs in which MPP generates an intermediate precursor form which is cleaved by a second enzyme, mitochondrial intermediate peptidase, to generate the mature protein.

[0481] Mitochondrial dysfunction leads to impaired calcium buffering, generation of free radicals that may participate in deleterious intracellular and extracellular processes, changes in mitochondrial permeability and oxidative damage which is observed in several neurodegenerative diseases. Neurodegenerative diseases linked to mitochondrial dysfunction include some forms of Alzheimer's disease, Friedreich's ataxia, familial amyotrophic lateral sclerosis, and Huntington's disease (Beal, M. F. (1998) Biochim. Biophys. Acta 1366:211-213). The myocardium is heavily dependent on oxidative metabolism, so mitochondrial dysfunction often leads to heart disease (DiMauro, S. and M. Hirano (1998) Curr. Opin Cardiol 13:190-197). Mitochondria are implicated in disorders of cell proliferation, since they play an important role in a cell's decision to proliferate or self-destruct through apoptosis. The oncoprotein Bcl-2, for example, promotes cell proliferation by stabilizing mitochondrial membranes so that apoptosis signals are not released (Susin, S. A. (1998) Biochim. Biophys. Acta 1366:151-165).

[0482] Transcription Factor Molecules

[0483] Multicellular organisms are comprised of diverse cell types that differ dramatically both in structure and function. The identity of a cell is determined by its characteristic pattern of gene expression, and different cell types express overlapping but distinctive sets of genes throughout development. Spatial and temporal regulation of gene expression is critical for the control of cell proliferation, cell differentiation, apoptosis, and other processes that contribute to organismal development. Futhermore, gene expression is regulated in response to extracellular signals that mediate cell-cell communication and coordinate the activities of different cell types. Appropriate gene regulation also ensures that cells function efficiently by expressing only those genes whose functions are required at a given time.

[0484] Transcriptional regulatory proteins are essential for the control of gene expression. Some of these proteins function as transcription factors that initiate, activate, repress, or terminate gene transcription. Transcription factors generally bind to the promoter, enhancer, and upstream regulatory regions of a gene in a sequence-specific manner, although some factors bind regulatory elements with or downstream of a gene's coding region. Transcription factors may bind to a specific region of DNA singly or as a complex with other accessory factors. (Reviewed in Lewin, B. (1990) Genes IV, Oxford University Press, New York N.Y., and Cell Press, Cambridge Mass., pp. 554-570.)

[0485] The double helix structure and repeated sequences of DNA create topological and chemical features which can be recognized by transcription factors. These features are hydrogen bond donor and acceptor groups, hydrophobic patches, major and minor grooves, and regular, repeated stretches of sequence which induce distinct bends in the helix. Typically, transcription factors recognize specific DNA sequence motifs of about 20 nucleotides in length. Multiple, adjacent transcription factor-binding motifs may be required for gene regulation.

[0486] Many transcription factors incorporate DNA-binding structural motifs which comprise either α helices or β sheets that bind to the major groove of DNA. Four well-characterized structural motifs are helix-turn-helix, zinc finger, leucine zipper, and helix-loop-helix. Proteins containing these motifs may act alone as monomers, or they may form homo- or heterodimers that interact with DNA.

[0487] The helix-turn-helix motif consists of two a helices connected at a fixed angle by a short chain of amino acids. One of the helices binds to the major groove. Helix-turn-helix motifs are exemplified by the homeobox motif which is present in homeodomain proteins. These proteins are critical for specifying the anterior-posterior body axis during development and are conserved throughout the animal kingdom. The Antennapedia and Ultrabithorax proteins of Drosophila melanogaster are prototypical homeodomain proteins (Pabo, C. O. and R. T. Sauer (1992) Annu. Rev. Biochem. 61:1053-1095).

[0488] The zinc finger motif, which binds zinc ions, generally contains tandem repeats of about 30 amino acids consisting of periodically spaced cysteine and histidine residues. Examples of this sequence pattern, designated C2H2 and C3HC4 (“RING” finger), have been described Lewin, supra). Zinc finger proteins each contain an α helix and an antiparallel β sheet whose proximity and conformation are maintained by the zinc ion. Contact with DNA is made by the arginine prece ding the α helix and by the second, third, and sixth residues of the α helix. Variants of the zinc finger motif include poorly defined cysteine-rich motifs which bind zinc or other metal ions. These motifs may not contain histidine residues and are generally nonrepetitive.

[0489] The leucine zipper motif comprises a stretch of amino acids rich in leucine which can form an amphipathic α helix. This structure provides the basis for dimerization of two leucine zipper proteins. The region adjacent to the leucine zipper is usually basic, and upon protein dimerization, is optimally positioned for binding to the major groove. Proteins containing such motifs are generally referred to as bZIP transcription factors.

[0490] The helix-loop-helix motif (HLH) consists of a short α helix connected by a loop to a longer α helix. The loop is flexible and allows the two helices to fold back against each other and to bind to DNA. The transcription factor Myc contains a prototypical HLH motif.

[0491] Most transcription factors contain characteristic DNA binding motifs, and variations on the above motifs and new motifs have been and are currently being characterized (Faisst, S. and S. Meyer (1992) Nucleic Acids Res. 20:3-26).

[0492] Many neoplastic disorders in humans can be attributed to inappropriate gene expression. Malignant cell growth may result from either excessive expression of tumor promoting genes or insufficient expression of tumor suppressor genes (Cleary, M. L. (1992) Cancer Surv. 15:89-104). Chromosomal translocations may also produce chimeric loci which fuse the coding sequence of one gene with the regulatory regions of a second unrelated gene. Such an arrangement likely results in inappropriate gene transcription, potentially contributing to malignancy.

[0493] In addition, the immune system responds to infection or trauma by activating a cascade of events that coordinate the progressive selection, amplification, and mobilization of cellular defense mechanisms. A complex and balanced program of gene activation and repression is involved in this process. However, hyperactivity of the immune system as a result of improper or insufficient regulation of gene expression may result in considerable tissue or organ damage. This damage is well documented in immunological responses associated with arthritis, allergens, heart attack, stroke, and infections (Isselbacher, K. J. et al. (1996) Harrison's Principles of Internal Medicine, 13/e, McGraw Hill, Inc. and Teton Data Systems Software).

[0494] Furthermore, the generation of multicellular organisms is based upon the induction and coordination of cell differentiation at the appropriate stages of development Central to this process is differential gene expression, which confers the distinct identities of cells and tissues throughout the body. Failure to regulate gene expression during development can result in developmental disorders. Human developmental disorders caused by mutations in zinc finger-type transcriptional regulators include: urogenenital developmental abnormalities associated with WT1; Greig cephalopolysyndactyly, Pallister-Hall syndrome, and postaxial polydactyly type A (GLI3); and Townes-Brocks syndrome, characterized by anal, renal, limb, and ear abnormalities (SALL1) (Engelkamp, D. and V. van Heyningen (1996) Curr. Opin. Genet Dev. 6:334342; Kohlhase, J. et al. (1999) Am. J. Hum. Genet 64:435445).

[0495] Cell Membrane Molecules

[0496] Eukaryotic cells are surrounded by plasma membranes which enclose the cell and maintain an environment inside the cell that is distinct from its surroundings. In addition, eukaryotic organisms are distinct from prokaryotes in possessing many intracellular organelle and vesicle structures. Many of the metabolic reactions which distinguish eukaryotic biochemistry from prokaryotic biochemistry take place within these structures. The plasma membrane and the membranes surrounding organelles and vesicles are composed of phosphoglycerides, fatty acids, cholesterol, phospholipids, glycolipids, proteoglycans, and proteins. These components confer identity and functionality to the membranes with which they associate.

[0497] Integral Membrane Proteins

[0498] The majority of known integral membrane proteins are transmembrane proteins (TM) which are characterized by an extracellular, a transmembrane, and an intracellular domain. TM domains are typically comprised of 15 to 25 hydrophobic amino acids which are predicted to adopt an α-helical conformation. TM proteins are classified as bitopic (Types I and I) and polytopic (Types III and IV) (Singer, S. J. (1990) Annu. Rev. Cell Biol. 6:247-296). Bitopic proteins span the membrane once while polytopic proteins contain multiple membrane-spanning segments. TM proteins function as cell-surface receptors, receptor-interacting proteins, transporters of ions or metabolites, ion channels, cell anchoring proteins, and cell type-specific surface antigens.

[0499] Many membrane proteins (MPs) contain amino acid sequence motifs that target these proteins to specific subcellular sites. Examples of these motifs include PDZ domains, KDEL, ROD, NOR, and GSL sequence motifs, von Willebrand factor A (vWFA) domains, and EGF-like domains. RGD, NGR, and GSL motif-containing peptides have been used as drug delivery agents in targeted cancer treatment of tumor vasculature (Arap, W. et al. (1998) Science 279:377-380). Furthermore, MPs may also contain amino acid sequence motifs, such as the carbohydrate recognition domain (CRD), that mediate interactions with extracellular or intracellular molecules.

[0500] G-Protein Coupled Receptors

[0501] G-protein coupled receptors (GPCR) are a superfamily of integral membrane proteins which transduce extracellular signals. GPCRs include receptors for biogenic amines, lipid mediators of inflammation, peptide hormones, and sensory signal mediators. The structure of these highly-conserved receptors consists of seven hydrophobic transmembrane regions, an extracellular N-terminus, and a cytoplasmic C-terminus. Three extracellular loops alternate with three intracellular loops to link the seven transmembrane regions. Cysteine disulfide bridges connect the second and third extracellular loops. The most conserved regions of GPCRs are the transmembrane regions and the first two cytoplasmic loops. A conserved, acidic-Arg-aromatic residue triplet present in the second cytoplasmic loop may interact with G proteins. A GPCR consensus pattern is characteristic of most proteins belonging to this superfamily (ExPASy PROSITE document PS00237; and Watson, S. and S. Arkinstall (1994) The G-protein Linked Receptor Facts Book, Academic Press, San Diego Calif., pp. 2-6). Mutations and changes in transcriptional activation of GPCR-encoding genes have been associated with neurological disorders such as schizophrenia, Parkinson's disease, Alzheimer's disease, drug addiction, and feeding disorders.

[0502] Scavenger Receptors

[0503] Macrophage scavenger receptors with broad ligand specificity may participate in the binding of low density lipoproteins (LDL) and foreign antigens. Scavenger receptors types I and II are trimeric membrane proteins with each subunit containing a small N-terminal intracellular domain, a transmembrane domain, a large extracellular domain, and a C-terminal cysteine-rich domain. The extracellular domain contains a short spacer region, an α-helical coiled-coil region, and a triple helical collagen-like region. These receptors have been shown to bind a spectrum of ligands, including chemically modified lipoproteins and albumin, polyribonucleotides, polysaccharides, phospholipids, and asbestos (Matsumoto, A. et al. (1990) Proc. Natl. Acad. Sci. USA 87:9133-9137; and Elomaa, 0. et al. (1995) Cell 80:603-609). The scavenger receptors are thought to play a key role in atherogenesis by mediating uptake of modified LDL in arterial walls, and in host defense by binding bacterial endotoxins, bacteria, and protozoa

[0504] Tetraspan Family Proteins

[0505] The transmembrane 4 superfamily (TM4SF) or tetraspan family is a multigene family encoding type III integral membrane proteins (Wright, AD. and M. G. Tomlinson (1994) Immunol.

[0506] Today 15:588-594). The TM4SF is comprised of membrane proteins which traverse the cell membrane four times. Members of the TM4SF include platelet and endothelial cell membrane proteins, melanoma-associated antigens, leukocyte surface glycoproteins, colonal carcinoma antigens, tumor-associated antigens, and surface proteins of the schistosome parasites (Jankowski, S. A. (1994) Oncogene 9:1205-1121). Members of the TM4SF share about 25-30% amino acid sequence identity with one another.

[0507] A number of TM4SF members have been implicated in signal transduction, control of cell adhesion, regulation of cell growth and proliferation, including development and oncogenesis, and cell motility, including tumor cell metastasis. Expression of TM4SF proteins is associated with a variety of tumors and the level of expression may be altered when cells are growing or activated.

[0508] Tumor Antigens

[0509] Tumor antigens are cell surface molecules that are differentially expressed in tumor cells relative to normal cells. Tumor antigens distinguish tumor cells immunologically from normal cells and provide diagnostic and therapeutic targets for human cancers (Takagi, S. et al. (1995) Int. J. Cancer 61:706-715; Liu, E. et al. (1992) Oncogene 7:1027-1032).

[0510] Leukocyte Antigens

[0511] Other types of cell surface antigens include those identified on leukocytic cells of the immune system. These antigens have been identified using systematic, monoclonal antibody (mAb)-based “shot gun” techniques. These techniques have resulted in the production of hundreds of mAbs directed against unknown cell surface leukocytic antigens. These antigens have been grouped into “clusters of differentiation” based on common immunocytochemical localization patterns in various differentiated and undifferentiated leukocytic cell types. Antigens in a given cluster are presumed to identify a single cell surface protein and are assigned a “cluster of differentiation” or “CD” designation. Some of the genes encoding proteins identified by CD antigens have been cloned and verified by standard molecular biology techniques. CD antigens have been characterized as both transmembrane proteins and cell surface proteins anchored to the plasma membrane via covalent attachment to fatty acid-containing glycolipids such as glycosylphosphatidylinositol (GPI). (Reviewed in Barclay, A. N. et al. (1995) The Leucocyte Antigen Facts Book, Academic Press, San Diego Calif., pp. 17-20.)

[0512] Ion Channels

[0513] Ion channels are found in the plasma membranes of virtually every cell in the body. For example, chloride channels mediate a variety of cellular functions including regulation of membrane potentials and absorption and secretion of ions across epithelial membranes. Chloride channels also regulate the pH of organelles such as the Golgi apparatus and endosomes (see, e.g., Greger, R. (1988)

[0514] Annu. Rev. Physiol. 50:111-122). Electrophysiological and pharmacological properties of chloride channels, including ion conductance, current-voltage relationships, and sensitivity to modulators, suggest that different chloride channels exist in muscles, neurons, fibroblasts, epithelial cells, and lymphocytes.

[0515] Many ion channels have sites for phosphorylation by one or more protein kinases including protein kinase A, protein kinase C, tyrosine kinase, and casein kinase II, all of which regulate ion channel activity in cells. Inappropriate phosphorylation of proteins in cells has been linked to changes in cell cycle progression and cell differentiation. Changes in the cell cycle have been linked to induction of apoptosis or cancer. Changes in cell differentiation have been linked to diseases and disorders of the reproductive system, immune system, skeletal muscle, and other organ systems.

[0516] Proton Pumps

[0517] Proton ATPases comprise a large class of membrane proteins that use the energy of ATP hydrolysis to generate an electrochemical proton gradient across a membrane. The resultant gradient may be used to transport other ions across the membrane (Na⁺, K⁺, or Cl⁻) or to maintain organelle pH. Proton ATPases are further subdivided into the mitochondrial F-ATPases, the plasma membrane ATPases, and the vacuolar ATPases. The vacuolar ATPases establish and maintain an acidic pH within various organelles involved in the processes of endocytosis and exocytosis (Mellman, I. et al. (1986) Annu. Rev. Biochem 55:663-700).

[0518] Proton-coupled, 12 membrane-spanning domain transporters such as PEPT 1 and PEPT 2 are responsible for gastrointestinal absorption and for renal reabsorption of peptides using an electrochemical H⁺ gradient as the driving force. Another type of peptide transporter, the TAP transporter, is a heterodimer consisting of TAP 1 and TAP 2 and is associated with antigen processing. Peptide antigens are transported across the membrane of the endoplasmic reticulum by TAP so they can be expressed on the cell surface in association with MHC molecules. Each TAP protein consists of multiple hydrophobic membrane spanning segments and a highly conserved ATP-binding cassette (Boll, M. et al. (1996) Proc. Natl. Acad. Sci. USA 93:284-289). Pathogenic microorganisms, such as herpes simplex virus, may encode inhibitors of TAP-mediated peptide transport in order to evade immune surveillance (Marusina, K and J. J. Manaco (1996) Curr. Opin.

[0519] Hematol. 3:19-26).

[0520] ABC Transporters

[0521] The ATP-binding cassette (ABC) transporters, also called the “traffic ATPases”, comprise a superfamily of membrane proteins that mediate transport and channel functions in prokaryotes and eukaryotes (Higgins, C. F. (1992) Annu. Rev. Cell Biol. 8:67-113). ABC proteins share a similar overall structure and significant sequence homology. All ABC proteins contain a conserved domain of approximately two hundred amino acid residues which includes one or more nucleotide binding domains. Mutations in ABC transporter genes are associated with various disorders, such as hyperbilirubinemia II/Dubin-Johnson syndrome, recessive Stargardt's disease, X-linked adrenoleukodystrophy, multidrug resistance, celiac disease, and cystic fibrosis.

[0522] Peripheral and Anchored Membrane Proteins

[0523] Some membrane proteins are not membrane-spanning but are attached to the plasma membrane via membrane anchors or interactions with integral membrane proteins. Membrane anchors are covalently joined to a protein post-translationally and include such moieties as prenyl, myristyl, and glycosylphosphatidyl inositol groups. Membrane localization of peripheral and anchored proteins is important for their function in processes such as receptor-mediated signal transduction. For example, prenylation of Ras is required for its localization to the plasma membrane and for its normal and oncogenic functions in signal transduction.

[0524] Vesicle Coat Proteins

[0525] Intercellular communication is essential for the development and survival of multicellular organisms. Cells communicate with one another through the secretion and uptake of protein signaling molecules. The uptake of proteins into the cell is achieved by the endocytic pathway, in which the interaction of extracellular signaling molecules with plasma membrane receptors results in the formation of plasma membrane-derived vesicles that enclose and transport the molecules into the cytosol. These transport vesicles fuse with and mature into endosomal and lysosomal (digestive) compartments. The secretion of proteins from the cell is achieved by exocytosis, in which molecules inside of the cell proceed through the secretory pathway. In this pathway, molecules transit from the ER to the Golgi apparatus and finally to the plasma membrane, where they are secreted from the cell.

[0526] Several steps in the transit of material along the secretory and endocytic pathways require the formation of transport vesicles. Specifically, vesicles form at the transitional endoplasmic reticulum (tER), the rim of Golgi cisternae, the face of the Trans-Golgi Network (TGN), the plasma membrane (M), and tubular extensions of the endosomes. Vesicle formation occurs when a region of membrane buds off from the donor organelle. The membrane-bound vesicle contains proteins to be transported and is surrounded by a proteinaceous coat, the components of which are recruited from the cytosol. Two different classes of coat protein have been identified. Clathrin coats form on vesicles derived from the TGN and PM, whereas coatomer (COP) coats form on vesicles derived from the ER and Golgi. COP coats can be further classified as COPI, involved in retrograde traffic through the Golgi and from the Golgi to the ER, and COPII, involved in anterograde traffic from the ER to the Golgi (Mellman supra).

[0527] In clathrin-based vesicle formation, adapter proteins bring vesicle cargo and coat proteins together at the surface of the budding membrane. Adapter protein-1 and -2 select cargo from the TGN and plasma membrane, respectively, based on molecular information encoded on the cytoplasmic tail of integral membrane cargo proteins. Adapter proteins also recruit clathrin to the bud site. Clathrin is a protein complex consisting of three large and three small polypeptide chains arranged in a three-legged structure called a triskelion. Multiple triskelions and other coat proteins appear to self-assemble on the membrane to form a coated pit. This assembly process may serve to deform the membrane into a budding vesicle. GTP-bound ADP-ribosylation factor (Arf) is also incorporated into the coated assembly. Another small G-protein, dynamin, forms a ring complex around the neck of the forming vesicle and may provide the mechanochemical force to seal the bud, thereby releasing the vesicle. The coated vesicle complex is then transported through the cytosol. During the transport process, Arf-bound GTP is hydrolyzed to GDP, and the coat dissociates from the transport vesicle (West, M. A. et al. (1997) J. Cell Biol. 138:1239-1254).

[0528] Vesicles which bud from the ER and the Golgi are covered with a protein coat similar to the clathrin coat of endocytic and TGN vesicles. The coat protein (COP) is assembled from cytosolic precursor molecules at specific budding regions on the organelle. The COP coat consists of two major components, a G-protein (Arf or Sar) and coat protomer (coatomer). Coatomer is an equimolar complex of seven proteins, termed alpha-, beta-, beta′-, gamma-, delta-, epsilon- and zeta-COP. The coatomer complex binds to dilysine motifs contained on the cytoplasmic tails of integral membrane proteins. These include the KKXX retrieval motif of membrane proteins of the ER and dibasic/diphenylamine motifs of members of the p24 family. The p24 family of type I membrane proteins represent the major membrane proteins of COPI vesicles (Harter, C. and F. T. Wieland (1998) Proc. Natl. Acad. Sci. USA 95:11649-11654).

[0529] Organelle Associated Molecules

[0530] Eukaryotic cells are organized into various cellular organelles which has the effect of separating specific molecules and their functions from one another and from the cytosol. Within the cell, various membrane structures surround and define these organelles while allowing them to interact with one another and the cell environment through both active and passive transport processes. Important cell organelles include the nucleus, the Golgi apparatus, the endoplasmic reticulum, mitochondria, peroxisomes, lysosomes, endosomes, and secretory vesicles.

[0531] Nucleus

[0532] The cell nucleus contains all of the genetic information of the cell in the form of DNA, and the components and machinery necessary for replication of DNA and for transcription of DNA into RNA. (See Alberts, B. et al. (1994) Molecular Biology of the Cell, Garland Publishing Inc., New York N.Y., pp. 335-399.) DNA is organized into compact structures in the nucleus by interactions with various DNA-binding proteins such as histones and non-histone chromosomal proteins. DNA-specific nucleases, DNAses, partially degrade these compacted structures prior to DNA replication or transcription. DNA replication takes place with the aid of DNA helicases which unwind the double-stranded DNA helix, and DNA polymerases that duplicate the separated DNA strands.

[0533] Transcriptional regulatory proteins are essential for the control of gene expression. Some of these proteins function as transcription factors that initiate, activate, repress, or terminate gene transcription. Transcription factors generally bind to the promoter, enhancer, and upstream regulatory regions of a gene in a sequence-specific manner, although some factors bind regulatory elements within or downstream of a gene's coding region. Transcription factors may bind to a specific region of DNA singly or as a complex with other accessory factors. (Reviewed in Lewin, B. (1990) Genes IV, Oxford University Press, New York N.Y., and Cell Press, Cambridge Mass., pp. 554570.) Many transcription factors incorporate DNA-binding structural motifs which comprise either α helices or β sheets that bind to the major groove of DNA. Four well-characterized structural motifs are helix-turn-helix, zinc finger, leucine zipper, and helix-loop-helix. Proteins containing these motifs may act alone as monomers, or they may form homo- or heterodimers that interact with DNA.

[0534] Many neoplastic disorders in humans can be attributed to inappropriate gene expression. Malignant cell growth may result from either excessive expression of tumor promoting genes or insufficient expression of tumor suppressor genes (Cleary, M. L. (1992) Cancer Surv. 15:89-104). Chromosomal translocations may also produce chimeric loci which fuse the coding sequence of one gene with the regulatory regions of a second unrelated gene. Such an arrangement likely results in inappropriate gene transcription, potentially contributing to malignancy.

[0535] In addition, the immune system responds to infection or trauma by activating a cascade of events that coordinate the progressive selection, amplification, and mobilization of cellular defense mechanisms. A complex and balanced program of gene activation and repression is involved in this process. However, hyperactivity of the immune system as a result of improper or insufficient regulation of gene expression may result in considerable tissue or organ damage. This damage is well documented in immunological responses associated with arthritis, allergens, heart attack, stroke, and infections (Isselbacher, K. J. et al. (1996) Harrison's Principles of Internal Medicine, 13/e, McGraw Hill, Inc. and Teton Data Systems Software).

[0536] Transcription of DNA into RNA also takes place in the nucleus catalyzed by RNA polymerases. Three types of RNA polymerase exist RNA polymerase I makes large ribosomal RNAs, while RNA polymerase m makes a variety of small, stable RNAs including 5S ribosomal RNA and the transfer RNAs (tRNA). RNA polymerase II transcribes genes that will be translated into proteins. The primary transcript of RNA polymerase II is called heterogenous nuclear RNA (hnRNA), and must be further processed by splicing to remove non-coding sequences called introns. RNA splicing is mediated by small nuclear ribonucleoprotein complexes, or snRNPs, producing mature messenger RNA (mRNA) which is then transported out of the nucleus for translation into proteins.

[0537] Nucleolus

[0538] The nucleolus is a highly organized subcompartment in the nucleus that contains high concentrations of RNA and proteins and functions mainly in ribosomal RNA synthesis and assembly (Alberts, et al. supra, pp. 379-382). Ribosomal RNA (rRNA) is a structural RNA that is complexed with proteins to form ribonucleoprotein structures called ribosomes. Ribosomes provide the platform on which protein synthesis takes place.

[0539] Ribosomes are assembled in the nucleolus initially from a large, 45S rRNA combined with a variety of proteins imported from the cytoplasm, as well as smaller, 5S rRNAs. Later processing of the immature ribosome results in formation of smaller ribosomal subunits which are transported from the nucleolus to the cytoplasm where they are assembled into functional ribosomes.

[0540] Endoplasmic Reticulum

[0541] In eukaryotes, proteins are synthesized within the endoplasmic reticulum (ER), delivered from the ER to the Golgi apparatus for post-translational processing and sorting, and transported from the Golgi to specific intracellular and extracellular destinations. Synthesis of integral membrane proteins, secreted proteins, and proteins destined for the lumen of a particular organelle occurs on the rough endoplasmic reticulum (ER). The rough ER is so named because of the rough appearance in electron micrographs imparted by the attached ribosomes on which protein synthesis proceeds. Synthesis of proteins destined for the ER actually begins in the cytosol with the synthesis of a specific signal peptide which directs the growing polypeptide and its attached ribosome to the ER membrane where the signal peptide is removed and protein synthesis is completed. Soluble proteins destined for the ER lumen, for secretion, or for transport to the lumen of other organelles pass completely into the ER lumen. Transmembrane proteins destined for the ER or for other cell membranes are translocated across the ER membrane but remain anchored in the lipid bilayer of the membrane by one or more membrane-spanning α-helical regions.

[0542] Translocated polypeptide chains destined for other organelles or for secretion also fold and assemble in the ER lumen with the aid of certain “resident” ER proteins. Protein folding in the ER is aided by two principal types of protein isomerases, protein disulfide isomerase (PDI), and peptidyl-prolyl isomerase (PPI). PDI catalyzes the oxidation of free sulfhdryl groups in cysteine residues to form intramolecular disulfide bonds in proteins. PPI, an enzyme that catalyzes the isomerization of certain proline imide bonds in oligopeptides and proteins, is considered to govern one of the rate limiting steps in the folding of many proteins to their final functional conformation. The cyclophilins represent a major class of PPI that was originally identified as the major receptor for the immunosuppressive drug cyclosporin A (Handschumacher, R. E. et al. (1984) Science 226:544-547). Molecular “chaperones” such as BiP (binding protein) in the ER recognize incorrectly folded proteins as well as proteins not yet folded into their final form and bind to them, both to prevent improper aggregation between them, and to promote proper folding.

[0543] The “N-linked” glycosylation of most soluble secreted and membrane-bound proteins by oligosacchrides linked to asparagine residues in proteins is also performed in the ER. This reaction is catalyzed by a membrane-bound enzyme, oligosaccharyl transferase.

[0544] Golgi Apparatus

[0545] The Golgi apparatus is a complex structure that lies adjacent to the ER in eukaryotic cells and serves primarily as a sorting and dispatching station for products of the ER (Alberts, et al. supra, pp. 600-610). Additional posttranslational processing, principally additional glycosylation, also occurs in the Golgi. Indeed, the Golgi is a major site of carbohydrate synthesis, including most of the glycosaminoglycans of the extracellular matrix. N-linked oligosaccharides, added to proteins in the ER, are also further modified in the Golgi by the addition of more sugar residues to form complex N-linked oligosaccharides. “O-linked” glycosylation of proteins also occurs in the Golgi by the addition of N-acetylgalactosamine to the hydroxyl group of a serine or threonine residue followed by the sequential addition of other sugar residues to the first. This process is catalyzed by a series of glycosyltransferases each specific for a particular donor sugar nucleotide and acceptor molecule (Lodish, H. et al. (1995) Molecular Cell Biology, W. H. Freeman and Co., New York N.Y., pp.700-708). In many cases, both N- and O-linked oligosaccharides appear to be required for the secretion of proteins or the movement of plasma membrane glycoproteins to the cell surface.

[0546] The terminal compartment of the Golgi is the Trans-Golgi Network (TGN), where both membrane and lumenal proteins are sorted for their final destination. Transport (or secretory) vesicles destined for intracellular compartments, such as lysosomes, bud off of the TGN. Other transport vesicles bud off containing proteins destined for the plasma membrane, such as receptors, adhesion molecules, and ion channels, and secretory proteins, such as hormones, neurotransmitters, and digestive enzymes.

[0547] Vacuoles

[0548] The vacuole system is a collection of membrane bound compartments in eukaryotic cells that functions in the processes of endocytosis and exocytosis. They include phagosomes, lysosomes, endosomes, and secretory vesicles. Endocytosis is the process in cells of internalizing nutrients, solutes or small particles (pinocytosis) or large particles such as internalized receptors, viruses, bacteria, or bacterial toxins (phagocytosis). Exocytosis is the process of transporting molecules to the cell surface. It facilitates placement or localization of membrane-bound receptors or other membrane proteins and secretion of hormones, neurotransmitters, digestive enzymes, wastes, etc.

[0549] A common property of all of these vacuoles is an acidic pH environment ranging from approximately pH 4.5-5.0. This acidity is maintained by the presence of a proton ATPase that uses the energy of ATP hydrolysis to generate an electrochemical proton gradient across a membrane (Mellman, I. et al. (1986) Annu. Rev. Biochem. 55:663-700). Eukaryotic vacuolar proton ATPase (vp-ATPase) is a multimeric enzyme composed of 3-10 different subunits. One of these subunits is a highly hydrophobic polypeptide of approximately 16 kDa that is similar to the proteolipid component of vp-ATPases from eubacteria, fungi, and plant vacuoles (Mandel, M. et al. (1988) Proc. Natl. Acad. Sci. USA 85:5521-5524). The 16 kDa proteolipid component is the major subunit of the membrane portion of vp-ATPase and functions in the transport of protons across the membrane.

[0550] Lysosomes

[0551] Lysosomes are membranous vesicles containing various hydrolytic enzymes used for the controlled intracellular digestion of macromolecules. Lysosomes contain some 40 types of enzymes including proteases, nucleases, glycosidases, lipases, phospholipases, phosphatases, and sulfatases, all of which are acid hydrolases that function at a pH of about 5. Lysosomes are surrounded by a unique membrane containing transport proteins that allow the final products of macromolecule degradation, such as sugars, amino acids, and nucleotides, to be transported to the cytosol where they may be either excreted or reutilized by the cell. A vp-ATPase, such as that described above, maintains the acidic environment necessary for hydrolytic activity (Alberts, supra, pp.610-611).

[0552] Endosomes

[0553] Endosomes are another type of acidic vacuole that is used to transport substances from the cell surface to the interior of the cell in the process of endocytosis. Like lysosomes, endosomes have an acidic environment provided by a vp-ATPase (Alberts et al. supra pp. 610-618). Two types of endosomes are apparent based on tracer uptake studies that distinguish their time of formation in the cell and their cellular location. Early endosomes are found near the plasma membrane and appear to function primarily in the recycling of internalized receptors back to the cell surface. Late endosomes appear later in the endocytic process close to the Golgi apparatus and the nucleus, and appear to be associated with delivery of endocytosed material to lysosomes or to the TGN where they may be recycled. Specific proteins are associated with particular transport vesicles and their target compartments that may provide selectivity in targeting vesicles to their proper compartments. A cytosolic prenylated GTP-binding protein, Rab, is one such protein. Rabs 4, 5, and 11 are associated with the early endosome, whereas Rabs 7 and 9 associate with the late endosome.

[0554] Mitochondria

[0555] Mitochondria are oval-shaped organelles comprising an outer membrane, a tightly folded inner membrane, an intermembrane space between the outer and inner membranes, and a matrix inside the inner membrane. The outer membrane contains many porin molecules that allow ions and charged molecules to enter the intermembrane space, while the inner membrane contains a variety of transport proteins that transfer only selected molecules. Mitochondria are the primary sites of energy production in cells.

[0556] Energy is produced by the oxidation of glucose and fatty acids. Glucose is initially converted to pyruvate in the cytoplasm. Fatty acids and pyruvate are transported to the mitochondria for complete oxidation to CO₂ coupled by enzymes to the transport of electrons from NADH and FADH₂ to oxygen and to the synthesis of ATP (oxidative phosphorylation) from ADP and Pᵢ, Pyruvate is transported into the mitochondria and converted to acetyl-CoA for oxidation via the citric acid cycle, involving pyruvate dehydrogenase components, dihydrolipoyl transacetylase, and dihydrolipoyl dehydrogenase. Enzymes involved in the citric acid cycle include: citrate synthetase, aconitases, isocitrate dehydrogenase, alpha-ketoglutarate dehydrogenase complex including transsuccinylases, succinyl CoA synthetase, succinate dehydrogenase, fumarases, and malate dehydrogenase. Acetyl CoA is oxidized to CO₂ with concomitant formation of NADH, FADH₂, and GTP. In oxidative phosphorylation, the transfer of electrons from NADH and FADH₂ to oxygen by dehydrogenases is coupled to the synthesis of ATP from ADP and Pᵢ by the F₀F₁ ATPase complex in the mitochondrial inner membrane. Enzyme complexes responsible for electron transport and ATP synthesis include the F₀F₁ ATPase complex, ubiquinone(CoQ)-cytochrome c reductase, ubiquinone reductase, cytochrome b, cytochrome c₁, FeS protein, and cytochrome c oxidase.

[0557] Peroxisomes

[0558] Peroxisomes, like mitochondria, are a major site of oxygen utilization. They contain one or more enzymes, such as catalase and urate oxidase, that use molecular oxygen to remove hydrogen atoms from specific organic substrates in an oxidative reaction that produces hydrogen peroxide (Alberts, supra, pp. 574577). Catalase oxidizes a variety of substrates including phenols, formic acid, formaldehyde, and alcohol and is important in peroxisomes of liver and kidney cells for detoxifying various toxic molecules that enter the bloodstream. Another major function of oxidative reactions in peroxisomes is the breakdown of fatty acids in a process called β oxidation. β oxidation results in shortening of the alkyl chain of fatty acids by blocks of two carbon atoms that are converted to acetyl CoA and exported to the cytosol for reuse in biosynthetic reactions.

[0559] Also like mitochondria, peroxisomes import their proteins from the cytosol using a specific signal sequence located near the C-terminus of the protein. The importance of this import process is evident in the inherited human disease Zellweger syndrome, in which a defect in importing proteins into perixosomes leads to a perixosomal deficiency resulting in severe abnormalities in the brain liver, and kidneys, and death soon after birth. One form of this disease has been shown to be due to a mutation in the gene encoding a perixosomal integral membrane protein called peroxisome assembly factor-1.

[0560] The discovery of new human molecules satisfies a need in the art by providing new compositions which are useful in the diagnosis, study, prevention, and treatment of diseases associated with, as well as effects of exogenous compounds on, the expression of human molecules.

### SUMMARY OF THE INVENTION

[0561] The present invention relates to nucleic acid sequences comprising human diagnostic and therapeutic polynucleotides (dithp) as presented in the Sequence Listing. The dithp uniquely identify genes encoding human structural, functional, and regulatory molecules.

[0562] The invention provides an isolated polynucleotide comprising a polynucleotide sequence selected from the group consisting of a) a polynucleotide sequence selected from the group consisting of SEQ ID NO:1-211; b) a naturally occurring polynucleotide sequence having at least 90% sequence identity to a polynucleotide sequence selected from the group consisting of SEQ ID NO:1-211; c) a polynucleotide sequence complementary to a); d) a polynucleotide sequence complementary to b); and e) an RNA equivalent of a) through d). In one alternative, the polynucleotide comprises a polynucleotide sequence selected from the group consisting of SEQ ID NO:1-211. In another alternative, the polynucleotide comprises at least 60 contiguous nucleotides of a polynucleotide sequence selected from the group consisting of a) a polynucleotide sequence selected from the group consisting of SEQ ID NO: 1-211; b) a naturally occurring polynucleotide sequence having at least 90% sequence identity to a polynucleotide sequence selected from the group consisting of SEQ ID NO:1-211; c) a polynucleotide sequence complementary to a); d) a polynucleotide sequence complementary to b); and e) an RNA equivalent of a) through d). The invention further provides a composition for the detection of expression of human diagnostic and therapeutic polynucleotides comprising at least one isolated polynucleotide comprising a polynucleotide sequence selected from the group consisting of a) a polynucleotide sequence selected from the group consisting of SEQ ID NO: 1-211; b) a naturally occurring polynucleotide sequence having at least 90% sequence identity to a polynucleotide sequence selected from the group consisting of SEQ ID NO:1-211; c) a polynucleotide sequence complementary to a); d) a polynucleotide sequence complementary to b); and e) an RNA equivalent of a) through d); and a detectable label.

[0563] The invention also provides a method for detecting a target polynucleotide in a sample, said target polynucleotide comprising a polynucleotide sequence selected from the group consisting of a) a polynucleotide sequence selected from the group consisting of SEQ ID NO:1-211; b) a naturally occurring polynucleotide sequence having at least 90% sequence identity to a polynucleotide sequence selected from the group consisting of SEQ ID NO:1-211; c) a polynucleotide sequence complementary to a); d) a polynucleotide sequence complementary to b); and e) an RNA equivalent of a) through d). The method comprises a) amplifying said target polynucleotide or a fragment thereof using polymerase chain reaction amplification, and b) detecting the presence or absence of said amplified target polynucleotide or fragment thereof, and, optionally, if present, the amount thereof.

[0564] The invention also provides a method for detecting a target polynucleotide in a sample, said target polynucleotide comprising a polynucleotide sequence selected from the group consisting of a) a polynucleotide sequence selected from the group consisting of SEQ ID NO:1-211; b) a naturally occurring polynucleotide sequence having at least 90% sequence identity to a polynucleotide sequence selected from the group consisting of SEQ ID NO:1-211; c) a polynucleotide sequence complementary to a); d) a polynucleotide sequence complementary to b); and e) an RNA equivalent of a) through d). The method comprises a) hybridizing the sample with a probe comprising at least 20 contiguous nucleotides comprising a sequence complementary to said target polynucleotide in the sample, and which probe specifically hybridizes to said target polynucleotide, under conditions whereby a hybridization complex is formed between said probe and said target polynucleotide, and b) detecting the presence or absence of said hybridization complex, and, optionally, if present, the amount thereof. In one alternative, the probe comprises at least 30 contiguous nucleotides. In another alternative, the probe comprises at least 60 contiguous nucleotides.

[0565] The invention further provides a recombinant polynucleotide comprising a promoter sequence operably linked to an isolated polynucleotide comprising a polynucleotide sequence selected from the group consisting of a) a polynucleotide sequence selected from the group consisting of SEQ ID NO:1-211; b) a naturally occurring polynucleotide sequence having at least 90% sequence identity to a polynucleotide sequence selected from the group consisting of SEQ ID NO:1-211; c) a polynucleotide sequence complementary to a); d) a polynucleotide sequence complementary to b); and e) an RNA equivalent of a) through d). In one alternative, the invention provides a cell transformed with the recombinant polynucleotide. In another alternative, the invention provides a transgenic organism comprising the recombinant polynucleotide. In a further alternative, the invention provides a method for producing a human diagnostic and therapeutic polypeptide, the method comprising a) culturing a cell under conditions suitable for expression of the human diagnostic and therapeutic polypeptide, wherein said cell is transformed with the recombinant polynucleotide, and b) recovering the human diagnostic and therapeutic polypeptide so expressed.

[0566] The invention also provides a purified human diagnostic and therapeutic polypeptide (DITHP) encoded by at least one polynucleotide comprising a polynucleotide sequence selected from the group consisting of SEQ ID NO:1-211. Additionally, the invention provides an isolated antibody which specifically binds to the human diagnostic and therapeutic polypeptide. The invention further provides a method of identifying a test compound which specifically binds to the human diagnostic and therapeutic polypeptide, the method comprising the steps of a) providing a test compound; b) combining the human diagnostic and therapeutic polypeptide with the test compound for a sufficient time and under suitable conditions for binding; and c) detecting binding of the human diagnostic and therapeutic polypeptide to the test compound, thereby identifying the test compound which specifically binds the human diagnostic and therapeutic polypeptide.

[0567] The invention further provides a microarray wherein at least one element of the microarray is an isolated polynucleotide comprising at least 60 contiguous nucleotides of a polynucleotide comprising a polynucleotide sequence selected from the group consisting of a) a polynucleotide sequence selected from the group consisting of SEQ ID NO:1-211; b) a naturally occurring polynucleotide sequence having at least 90% sequence identity to a polynucleotide sequence selected from the group consisting of SEQ ID NO:1-211; c) a polynucleotide sequence complementary to a); d) a polynucleotide sequence complementary to b); and e) an RNA equivalent of a) through d). The invention also provides a method for generating a transcript image of a sample which contains polynucleotides. The method comprises a) labeling the polynucleotides of the sample, b) contacting the elements of the microarray with the labeled polynucleotides of the sample under conditions suitable for the formation of a hybridization complex, and c) quantifying the expression of the polynucleotides in the sample.

[0568] Additionally, the invention provides a method for screening a compound for effectiveness in altering expression of a target polynucleotide, wherein said target polynucleotide comprises a polynucleotide sequence selected from the group consisting of a) a polynucleotide sequence selected from the group consisting of SEQ ID NO:1-211; b) a naturally occurring polynucleotide sequence having at least 90% sequence identity to a polynucleotide sequence selected from the group consisting of SEQ ID NO:1-211; c) a polynucleotide sequence complementary to a); d) a polynucleotide sequence complementary to b); and e) an RNA equivalent of a) through d). The method comprises a) exposing a sample comprising the target polynucleotide to a compound, and b) detecting altered expression of the target polynucleotide, and c) comparing the expression of the target polynucleotide in the presence of varying amounts of the compound and in the absence of the compound

[0569] The invention further provides a method for assessing toxicity of a test compound, said method comprising a) treating a biological sample containing nucleic acids with the test compound; b) hybridizing the nucleic acids of the treated biological sample with a probe comprising at least 20 contiguous nucleotides of a polynucleotide comprising a polynucleotide sequence selected from the group consisting of i) a polynucleotide sequence selected from the group consisting of SEQ ID NO:1-211; ii) a naturally occurring polynucleotide sequence having at least 90% sequence identity to a polynucleotide sequence selected from the group consisting of SEQ ID NO:1-211; iii) a polynucleotide sequence complementary to i), iv) a polynucleotide sequence complementary to ii), and v) an RNA equivalent of i)-iv). Hybridization occurs under conditions whereby a specific hybridization complex is formed between said probe and a target polynucleotide in the biological sample, said target polynucleotide comprising a polynucleotide sequence selected from the group consisting of i) a polynucleotide sequence selected from the group consisting of SEQ ID NO:1-211; ii) a naturally occurring polynucleotide sequence having at least 90% sequence identity to a polynucleotide sequence selected from the group consisting of SEQ ID NO:1-211; iii) a polynucleotide sequence complementary to i), iv) a polynucleotide sequence complementary to ii), and v) an RNA equivalent of i)-iv), and alternatively, the target polynucleotide comprises a fragment of a polynucleotide sequence selected from the group consisting of i-v above; c) quantifying the amount of hybridization complex; and d) comparing the amount of hybridization complex in the treated biological sample with the amount. of hybridization complex in an untreated biological sample, wherein a difference in the amount of hybridization complex in the treated biological sample is indicative of toxicity of the test compound. The invention further provides an isolated polypeptide comprising an amino acid sequence selected from the group consisting of a) an amino acid sequence selected from the group consisting of SEQ ID NO:212-422, b) a naturally occurring amino acid sequence having at least 90% sequence identity to an amino acid sequence selected from the group consisting of SEQ ID NO:212-422, c) a biologically active fragment of an amino acid sequence selected from the group consisting of SEQ ID NO:212-422, and d) an inmmunogenic fragment of an amino acid sequence selected from the group consisting of SEQ ID NO:212-422. In one alternative, the invention provides an isolated polypeptide comprising the amino acid sequence of SEQ ID NO:212-422.

### DESCRIPTION OF THE TABLES

[0570] Table 1 shows the sequence identification numbers (SEQ ID NO:s) and template identification numbers (template IDs) corresponding to the polynucleotides of the present invention, along with their GenBank hits (GI Numbers), probability scores, and functional annotations corresponding to the GenBank hits.

[0571] Table 2 shows the sequence identification numbers (SEQ ID NO:s) and template identification numbers (template IDs) corresponding to the polynucleotides of the present invention, along with polynucleotide segments of each template sequence as defined by the indicated “start” and “stop” nucleotide positions. The reading frames of the polynucleotide segments and the Pfam bits, Pfam descriptions, and E-values corresponding to the polypeptide domains encoded by the polynucleotide segments are indicated.

[0572] Table 3 shows the sequence identification numbers (SEQ ID NO:s) and template identification numbers (template IDs) corresponding to the polynucleotides of the present invention, along with polynucleotide segments of each template sequence as defined by the indicated “start and “stop” nucleotide positions. The reading frames of the polynucleotide segments are shown, and the polypeptides encoded by the polynucleotide segments constitute either signal peptide (SP) or transmembrane (TM) domains, as indicated. The membrane topology of the encoded polypeptide sequence is indicated, the N-terminus (N) listed as being oriented to either the cytosolic (in) or non-cytosolic (out) side of the cell membrane or organelle.

[0573] Table 4 shows the sequence identification numbers (SEQ ID NO:s) corresponding to the polynucleotides of the present invention, along with component sequence identification numbers (component IDs) corresponding to each template. The component sequences, which were used to assemble the template sequences, are defined by the indicated “start” and “stop” nucleotide positions along each template.

[0574] Table 5 shows the tissue distribution profiles for the templates of the invention Table 6 shows the sequence identification numbers (SEQ ID NO:s) corresponding to the polypeptides of the present invention, along with the reading frames used to obtain the polypeptide segments, the lengths of the polypeptide segments, the “start” and “stop” nucleotide positions of the polynucleotide sequences used to define the encoded polypeptide segments, the GenBank hits (GI Numbers), probability scores, and functional annotations corresponding to the GenBank hits.

[0575] Table 7 summarizes the bioinformatics tools which are useful for analysis of the polynucleotides of the present invention. The first column of Table 7 lists analytical tools, programs, and algorithms, the second column provides brief descriptions thereof, the third column presents appropriate references, all of which are incorporated by reference herein in their entirety, and the fourth column presents, where applicable, the scores, probability values, and other parameters used to evaluate the strength of a match between two sequences (the higher the score, the greater the homology between two sequences).

### DETAILED DESCRIPTION OF THE INVENTION

[0576] Before the nucleic acid sequences and methods are presented, it is to be understood that this invention is not limited to the particular machines, methods, and materials described. Although particular embodiments are described, machines, methods, and materials similar or equivalent to these embodiments may be used to practice the invention. The preferred machines, methods, and materials set forth are not intended to limit the scope of the invention which is limited only by the appended claims.

[0577] The singular forms “a”, “an”, and “the” include plural reference unless the context clearly dictates otherwise. AR technical and scientific terms have the meanings commonly understood by one of ordinary skill in the art. All publications are incorporated by reference for the purpose of describing and disclosing the cell lines, vectors, and methodologies which are presented and which might be used in connection with the invention. Nothing in the specification is to be construed as an admission that the invention is not entitled to antedate such disclosure by virtue of prior invention.

[0578] Definitions

[0579] As used herein, the lower case “ditmp” refers to a nucleic acid sequence, while the upper case “DrnHp” refers to an amino acid sequence encoded by dithp. A “full-length” dithp refers to a nucleic acid sequence containing the entire coding region of a gene endogenously expressed in human tissue.

[0580] “Adjuvants” are materials such as Freund's adjuvant, mineral gels (aluminum hydroxide), and surface active substances (lysolecithin, pluronic polyols, polyanions, peptides, oil emulsions, keyhole limpet hemocyanin, and dinitrophenol) which may be administered to increase a host's immunological response.

[0581] “Allele” refers to an alternative form of a nucleic acid sequence. Alleles result from a “mutation,” a change or an alternative reading of the genetic code. Any given gene may have none, one, or many allelic forms. Mutations which give rise to alleles include deletions, additions, or substitutions of nucleotides. Each of these changes may occur alone, or in combination with the others, one or more times in a given nucleic acid sequence. The present invention encompasses allelic dithp.

[0582] “Amino acid sequence” refers to a peptide, a polypeptide, or a protein of either natural or synthetic origin. The amino acid sequence is not limited to the complete, endogenous amino acid sequence and may be a fragment, epitope, variant, or derivative of a protein expressed by a nucleic acid sequence.

[0583] “Amplification” refers to the production of additional copies of a sequence and is carried out using polymerase chain reaction (PCR) technologies well known in the art.

[0584] “Antibody” refers to intact molecules as well as to fragments thereof, such as Fab, F(ab′)₂, and Fv fragments, which are capable of binding the epitopic determine. Antibodies that bind DITHP polypeptides can be prepared using intact polypeptides or using fragments containing small peptides of interest as the immunizing antigen. The polypeptide or peptide used to immunize an animal (e.g., a mouse, a rat, or a rabbit) can be derived from the translation of RNA, or synthesized chemically, and can be conjugated to a carrier protein if desired. Commonly used carriers that are chemically coupled to peptides include bovine serum albumin, thyroglobulin, and keyhole limpet hemocyanin (KLH). The coupled peptide is then used to immunize the animal.

[0585] “Antisense sequence” refers to a sequence capable of specifically hybridizing to a target sequence. The antisense sequence may include DNA, RNA, or any nucleic acid mimic or analog such as peptide nucleic acid (PNA); oligonucleotides having modified backbone linkages such as phosphorothioates, methylphosphonates, or benzylphosphonates; oligonucleotides having modified sugar groups such as 2′-methoxyethyl sugars or 2′-methoxyethoxy sugars; or oligonucleotides having modified bases such as 5-methyl cytosine, 2′-deoxyuracil, or 7-deaza-2′-deoxyguanosine.

[0586] “Antisense sequence” refers to a sequence capable of specifically hybridizing to a target sequence. The antisense sequence can be DNA, RNA, or any nucleic acid mimic or analog.

[0587] “Antisense technology” refers to any technology which relies on the specific hybridization of an antisense sequence to a target sequence.

[0588] A “bin” is a portion of computer memory space used by a computer program for storage of data, and bounded in such a manner that data stored in a bin may be retrieved by the program.

[0589] “Biologically active” refers to an amino acid sequence having a structural, regulatory, or biochemical function of a naturally occurring amino acid sequence.

[0590] “Clone joining” is a process for combining gene bins based upon the bins' containing sequence information from the same clone. The sequences may assemble into a primary gene transcript as well as one or more splice variants.

[0591] “Complementary” describes the relationship between two single-stranded nucleic acid sequences that anneal by base-pairing (5′-A-G-T-3′ pairs with its complement 3′-T-C-A-5).

[0592] A “component sequence” is a nucleic acid sequence selected by a computer program such as PHRED and used to assemble a consensus or template sequence from one or more component sequences.

[0593] A “consensus sequence” or “template sequence” is a nucleic acid sequence which has been assembled from overlapping sequences, using a computer program for fragment assembly such as the GEL VIEW fragment assembly system (Genetics Computer Group (GCG), Madison Wis.) or using a relational database management system (RDMS).

[0594] “Conservative amino acid substitutions” are those substitutions that, when made, least interfere with the properties of the original protein, i.e., the structure and especially the function of the protein is conserved and not significantly changed by such substitutions. The table below shows amino acids which may be substituted for an original amino acid in a protein and which are regarded as conservative substitutions.

| Original Residue | Conservative Substitution |
|---|---|
| Ala | Gly, Ser |
| Arg | His, Lys |
| Asn | Asp, Gln, His |
| Asp | Asn, Glu |
| Cys | Ala, Ser |
| Gln | Asn, Glu, His |
| Glu | Asp, Gln, His |
| Gly | Ala |
| His | Asn, Arg, Gln, Glu |
| Ile | Leu, Val |
| Leu | Ile, Val |
| Lys | Arg, Gln, Glu |
| Met | Leu, Ile |
| Phe | His, Met, Leu, Trp, Tyr |
| Ser | Cys,Thr |
| Thr | Ser, Val |
| Trp | Phe, Tyr |
| Tyr | His, Phe, Trp |
| Val | Ile, Leu, Thr |

[0595] Conservative substitutions generally maintain (a) the structure of the polypeptide backbone in the area of the substitution, for example, as a beta sheet or alpha helical conformation, (b) the charge or hydrophobicity of the molecule at the target site, or (c) the bulk of the side chain

[0596] “Deletion” refers to a change in either a nucleic or amino acid sequence in which at least one nucleotide or amino acid residue, respectively, is absent

[0597] “Derivative” refers to the chemical modification of a nucleic acid sequence, such as by replacement of hydrogen by an alkyl, acyl, amino, hydroxyl, or other group.

[0598] The terms “element” and “array element” refer to a polynucleotide, polypeptide, or other chemical compound having a unique and defined position on a microarray.

[0599] “E-value” refers to the statistical probability that a match between two sequences occurred by chance.

[0600] A “fragment” is a unique portion of dithp or DITHP which is identical in sequence to but shorter in length than the parent sequence. A fragment may comprise up to the entire length of the defined sequence, minus one nucleotide/amino acid residue. For example, a fragment may comprise from 10 to 1000 contiguous amino acid residues or nucleotides. A fragment used as a probe, primer, antigen, therapeutic molecule, or for other purposes, may be at least 5, 10, 15, 16, 20, 25, 30, 40, 50, 60, 75, 100, 150, 250 or at least 500 contiguous amino acid residues or nucleotides in length. Fragments may be preferentially selected from certain regions of a molecule. For example, a polypeptide fragment may comprise a certain length of contiguous amino acids selected from the first 250 or 500 amino acids (or first 25% or 50%) of a polypeptide as shown in a certain defined sequence. Clearly these lengths are exemplary, and any length that is supported by the specification, including the Sequence Listing and the figures, may be encompassed by the present embodiments.

[0601] A fragment of dithp comprises a region of unique polynucleotide sequence that specifically identifies dithp, for example, as distinct from any other sequence in the same genome. A fragment of dithp is useful, for example, in hybridization and amplification technologies and in analogous methods that distinguish dithp from related polynucleotide sequences. The precise length of a fragment of dithp and the region of dithp to which the fragment corresponds are routinely determinable by one of ordinary skill in the art based on the intended purpose for the fragment

[0602] A fragment of DITHP is encoded by a fragment of dithp. A fragment of DITHP comprises a region of unique amino acid sequence that specifically identifies DITHP. For example, a fragment of DITHP is useful as an immunogenic peptide for the development of antibodies that specifically recognize DITHP. The precise length of a fragment of DITHP and the region of DITHP to which the fragment corresponds are routinely determinable by one of ordinary skill in the art based on the intended purpose for the fragment.

[0603] A “full length” nucleotide sequence is one containing at least a start site for translation to a protein sequence, followed by an open reading frame and a stop site, and encoding a “full length” polypeptide.

[0604] “Hit” refers to a sequence whose annotation will be used to describe a given template. Criteria for selecting the top hit are as follows: if the template has one or more exact nucleic acid matches, the top hit is the exact match with highest percent identity. If the template has no exact matches but has significant protein hits, the top hit is the protein hit with the lowest E-value. If the template has no significant protein hits, but does have significant non-exact nucleotide hits, the top hit is the nucleotide hit with the lowest E-value.

[0605] “Homology” refers to sequence similarity either between a reference nucleic acid sequence and at least a fragment of a dithp or between a reference amino acid sequence and a fragment of a DITHP.

[0606] “Hybridization” refers to the process by which a strand of nucleotides anneals with a complementary strand through base pairing. Specific hybridization is an indication that two nucleic acid sequences share a high degree of identity. Specific hybridization complexes form under defined annealing conditions, and remain hybridized after the “washing” step. The defined hybridization conditions include the annealing conditions and the washing step(s), the latter of which is particularly important in determining the stringency of the hybridization process, with more stringent conditions allowing less non-specific binding, i.e., binding between pairs of nucleic acid probes that are not perfectly matched. Permissive conditions for annealing of nucleic acid sequences are routinely determinable and may be consistent among hybridization experiments, whereas wash conditions may be varied among experiments to achieve the desired stringency.

[0607] Generally, stringency of hybridization is expressed with reference to the temperature under which the wash step is carried out. Generally, such wash temperatures are selected to be about 5° C. to 20° C. lower than the thermal melting point (Tₘ) for the specific sequence at a defined ionic strength and pH. The Tₘ is the temperature (under defined ionic strength and pH) at which 50% of the target sequence hybridizes to a perfectly matched probe. An equation for calculating Tₘ and conditions for nucleic acid hybridization is well known and can be found in Sambrook et al., 1989, Molecular Cloning: A Laboratory Manual, 2^{nd} ed., vol. 1-3, Cold Spring Harbor Press, Plainview N.Y.; specifically see volume 2, chapter 9.

[0608] High stringency conditions for hybridization between polynucleotides of the present invention include wash conditions of 68° C. in the presence of about 0.2×SSC and about 0.1% SDS, for 1 hour. Alternatively, temperatures of about 65° C., 60° C., or 55° C. may be used. SSC concentration may be varied from about 0.2 to 2×SSC, with SDS being present at about 0.1%. Typically, blocking reagents are used to block non-specific hybridization. Such blocking reagents include, for instance, denatured salmon sperm DNA at about 100-200 μg/ml. Useful variations on these conditions will be readily apparent to those skilled in the art. Hybridization, particularly under high stringency conditions, may be suggestive of evolutionary similarity between the nucleotides. Such similarity is strongly indicative of a similar role for the nucleotides and their resultant proteins.

[0609] Other parameters, such as temperature, salt concentration; and detergent concentration may be varied to achieve the desired stringency. Denaturants, such as formamide at a concentration of about 35-50% v/v, may also be used under particular circumstanes, such as RNA:DNA hybridizations. Appropriate hybridization conditions are routinely determinable by one of ordinary skill in the art.

[0610] “Immunogenic” describes the potential for a natural, recombinant, or synthetic peptide, epitope, polypeptide, or protein to induce antibody production in appropriate animals, cells, or cell lines.

[0611] “Insertion” or “addition” refers to a change in either a nucleic or amino acid sequence in which at least one nucleotide or residue, respectively, is added to the sequence.

[0612] “Labeling” refers to the covalent or noncovalent joining of a polynucleotide, polypeptide, or antibody with a reporter molecule capable of producing a detectable or measurable signal.

[0613] Microarray” is any arrangement of nucleic acids, amino acids, antibodies, etc., on a substrate. The substrate may be a solid support such as beads, glass, paper, nitrocellulose, nylon, or an appropriate membrane.

[0614] “Linkers” are short stretches of nucleotide sequence which may be added to a vector or a dithp to create restriction endonuclease sites to facilitate cloning. “Polylinkers” are engineered to incorporate multiple restriction enzyme sites and to provide for the use of enzymes which leave 5′ or 3′ overhangs (e.g., BamHI, EcoRI, and HindIII) and those which provide blunt ends (e.g., EcoRV, SnaBI, and StuI).

[0615] “Naturally occurring” refers to an endogenous polynucleotide or polypeptide that may be isolated from viruses or prokaryotic or eukaryotic cells.

[0616] “Nucleic acid sequence” refers to the specific order of nucleotides joined by phosphodiester bonds in a linear, polymeric arrangement. Depending on the number of nucleotides, the nucleic acid sequence can be considered an oligomer, oligonucleotide, or polynucleotide. The nucleic acid can be DNA, RNA, or any nucleic acid analog, such as PNA, may be of genomic or synthetic origin, may be either double-stranded or single-stranded, and can represent either the sense or antisense (complementary) strand.

[0617] “Oligomer” refers to a nucleic acid sequence of at least about 6 nucleotides and as many as about 60 nucleotides, preferably about 15 to 40 nucleotides, and most preferably between about 20 and 30 nucleotides, that may be used in hybridization or amplification technologies. Oligomers may be used as, e.g., primers for PCR, and are usually chemically synthesized.

[0618] “Operably “inked” refers to the situation in which a first nucleic acid sequence is placed in a functional relationship with the second nucleic acid sequence. For instance, a promoter is operably lined to a coding sequence if the promoter affects the transcription or expression of the coding sequence. Generally, operably linked DNA sequences may be in close proximity or contiguous and, where necessary to join two protein coding regions, in the same reading frame.

[0619] “Peptide nucleic acid” (PNA) refers to a DNA mimic in which nucleotide bases are attached to a pseudopeptide backbone to increase stability. PNAs, also designated antigene agents, can prevent gene expression by targeting complementary messenger RNA

[0620] The phrases “percent identify” and “% identity”, as applied to polynucleotide sequences, refer to the percentage of residue matches between at least two polynucleotide sequences aligned using a standardized algorithm. Such an algorithm may insert, in a standardized and reproducible way, gaps in the sequences being compared in order to optimize alignment between two sequences, and therefore achieve a more meaningful comparison of the two sequences.

[0621] Percent identity between polynucleotide sequences ma” be determined using the default parameters of the CLUSTAL V algorithm as incorporated into the MEGALIGN version 3.12e sequence alignment program. This program is part of the LASERGENE software package, a suite of molecular biological analysis programs (DNASTAR, Madison Wis.). CLUSTAL V is described in Higgins, D. G. and Sharp, P. M. (1989) CABIOS 5:151-153 and in Higgins, D. G. et al. (1992) CABIOS 8:189-191. For pairwise alignments of polynucleotide sequences, the default parameters are set as follows: Ktuple=2, gap penalty-5, window=4, and “diagonals saved”=4. The “weighted” residue weight table is selected as the default Percent identity is reported by CLUSTAL V as the “percent similarity” between aligned polynucleotide sequence pairs.

[0622] Alternatively, a suite of commonly used and freely available sequence comparison algorithms is provided by the National Center for Biotechnology Information (NCBI) Basic Local Alignment Search Tool (BLAST) (Altschul, S. F. et al. (1990) J. Mol. Biol. 215:403-410), which is available from several sources, including the NCBI, Bethesda, Md., and on the Internet at http:/www.ncbi.nlm.nih.gov/BLAST/. The BLAST software suite includes various sequence analysis programs including “blasta,” that is used to determine alignment between a known polynucleotide sequence and other sequences on a variety of databases. Also available is a tool called “BLAST 2 Sequences” that is used for direct pairwise comparison of two nucleotide sequences. “BLAST 2 Sequences” can be accessed and used interactively at http:/www.ncbi.nlm.nih.gov/gorf/bl2/. The “BLAST 2 Sequences” tool can be used for both blastn and blastp (discussed below). BLAST programs are commonly used with gap and other parameters set to default settings. For example, to compare two nucleotide sequences, one may use blastn with the “BLAST 2 Sequences” tool Version 2.0.9 (May 7, 1999) set at default parameters. Such default parameters may be, for example:

[0623] Matrx: BLOSUM62

[0624] Reward for match: 1

[0625] Penalty for mismatch: −2

[0626] Open Gap: 5 and Extension Gap: 2 penalties

[0627] Gap x drop-off: 50

[0628] Expect: 10

[0629] Word Size: 11

[0630] Filter: on

[0631] Percent identity may be measured over the length of an entire defined sequence, for example, as defined by a particular SEQ ID number, or may be measured over a shorter length, for example, over the length of a fragment taken from a larger, defined sequence, for instance, a fragment of at least 20, at least 30, at least 40, at least 50, at least 70, at least 100, or at least 200 contiguous nucleotides. Such lengths are exemplary only, and it is understood that any fragment length supported by the sequences shown herein, in figures or Sequence Listings, may be used to describe a length over which percentage identity may be measured

[0632] Nucleic acid sequences that do not show a high degree of identity may nevertheless encode similar amino acid sequences due to the degeneracy of the genetic code. It is understood that changes in nucleic acid sequence can be made using this degeneracy to produce multiple nucleic acid sequences that all encode substantially the same protein.

[0633] The phrases “percent identity” and “% identity”, as applied to polypeptide sequences, refer to the percentage of residue matches between at least two polypeptide sequences aligned using a standardized algorithm. Methods of polypeptide sequence alignment are well-known. Some alignment methods take into account conservative amino acid substitutions. Such conservative substitutions, explained in more detail above, generally preserve the hydrophobicity and acidity of the substituted residue, thus preserving the structure (and therefore function) of the folded polypeptide.

[0634] Percent identity between polypeptide sequences may be determined using the default parameters of the CLUSTAL V algorithm as incorporated into the MEGALIGN version 3.12e sequence alignment program (descried and referenced above). For pairwise alignments of polypeptide sequences using CLUSTAL V, the default parameters are set as follows: Ktuple=1, gap penalty=3, window=5, and “diagonals saved”=5. The PAM250 matrix is selected as the default residue weight table. As with polynucleotide alignments, the percent identity is reported by CLUSTAL V as the “percent similarity” between aligned polypeptide sequence pairs.

[0635] Alternatively the NCBI BLAST software suite may be used For example, for a pairwise comparison of two polypeptide sequences, one may use the “BLAST 2 Sequences” tool Version 2.0.9 (May 7, 1999) with blastp set at default parameters. Such default parameters may be, for example.

[0636] Matrix: BLOSUM62

[0637] Open Gap: 11 and Extension Gap: 1 penalty

[0638] Gap x drop-off 50

[0639] Expect: 10

[0640] Word Size: 3

[0641] Filter: on

[0642] Percent identity may be measured over the length of an entire defined polypeptide sequence, for example, as defined by a particular SEQ ID number, or may be measured over a shorter length, for example, over the length of a fragment taken from a larger, defined polypeptide sequence, for instance, a fragment of at least 15, at least 20, at least 30, at least 40, at least 50, at least 70 or at least 150 contiguous residues. Such lengths are exemplary only, and it is understood that any fragment length supported by the sequences shown herein, in figures or Sequence Listings, may be used to describe a length over which percentage identity may be measured.

[0643] “Post-translational modification” of a DITHP may involve lipidation, glycosylation, phosphorylation, acetylation, racemization, proteolytic cleavage, and other modifications known in the art. These processes may occur synthetically or biochemically. Biochemical modifications win vary by cell type depending on the enzymatic milieu and the DITHP.

[0644] “Probe” refers to dithp or fragments thereof, which are used to detect identical, allelic or related nucleic acid sequences. Probes are isolated oligonucleotides or polynucleotides attached to a detectable label or reporter molecule. Typical labels include radioactive isotopes, ligands, chemiluminescent agents, and enzymes. “Primers” are short nucleic acids, usually DNA oligonucleotides, which may be annealed to a target polynucleotide by complementary base-pairing. The primer may then be extended along the target DNA strand by a DNA polymerase enzyme. Primer pairs can be used for amplification (and identification) of a nucleic acid sequence, e.g., by the polymerase chain reaction (PCR).

[0645] Probes and primers as used in the present invention typically comprise at least 15 contiguous nucleotides of a known sequence. In order to enhance specificity, longer probes and primers may also be employed, such as probes and primers that comprise at least 20, 30, 40, 50, 60, 70, 80, 90, 100, or at least 150 consecutive nucleotides of the disclosed nucleic acid sequences. Probes and primers may be considerably longer than these examples, and it is understood that any length supported by the specification, including the figures and Sequence Listing, may be used.

[0646] Methods for preparing and using probes and primers are described in the references, for example Sambrook et al., 1989, Molecular Cloning: A Laboratory Manual, 2^{nd} ed., vol. 1-3, Cold Spring Harbor Press, Plainview N.Y.; Ausubel et al., 1987, Current Protocols in Molecular Biology, Greene Publ. Assoc. & Wiley-Intersciences, New York N.Y.; Innis et al., 1990, PCR Protocols. A Guide to Methods and Applications, Academic Press, San Diego Calif. PCR primer pairs can be derived from a known sequence, for example, by using computer programs intended for that purpose such as Primer (Version 0.5, 1991, Whitehead Institute for Biomedical Research, Cambridge Mass.).

[0647] Oligonucleotides for use as primers are selected using software known in the art for such purpose. For example, OLIGO 4.06 software is useful for the selection of PCR primer pairs of up to 100 nucleotides each, and for the analysis of oligonucleotides and larger polynucleotides of up to 5,000 nucleotides from an input polynucleotide sequence of up to 32 kilobases. Similar primer selection programs have incorporated additional features for expanded capabilities. For example, the PrimOU primer selection program (available to the public from the Genome Center at University of Texas South West Medical Center, Dallas T.x.) is capable of choosing specific primers from megabase sequences and is thus useful for designing primers on a genome-wide scope. The Primer3 primer selection program (available to the public from the Whitehead institute/MIT Center for Genome Research, Cambridge Mass.) allows the user to input a “mispriming library,” in which sequences to avoid as primer binding sites are user-specified Primer3 is useful, in particular, for the selection of oligonucleotides for microarrays. (The source code for the latter two primer selection programs may also be obtained from their respective sources and modified to meet the user's specific needs.) The PrimeGen program (available to the public from the UK Human Genome Mapping Project Resource Centre, Cambridge UK) designs primers based on multiple sequence alignments, thereby allowing selection of primers that hybridize to either the most conserved or least conserved regions of aligned nucleic acid sequences. Hence, this program is useful for identification of both unique and conserved oligonucleotides and polynucleotide fragments. The oligonucleotides and polynucleotide fragments identified by any of the above selection methods are useful in hybridization technologies, for example, as PCR or sequencing primers, microarray elements, or specific probes to identify fully or partially complementary polynucleotides in a sample of nucleic acids. Methods of oligonucleotide selection are not limited to those described above.

[0648] “Purified” refers to molecules, either polynucleotides or polypeptides that are isolated or separated from their natural environment and are at least 60% free, preferably at least 75% free, and most preferably at least 90% free from other compounds with which they are naturally associated.

[0649] A “recombinant nucleic acid” is a sequence that is not naturally occurring or has a sequence that is made by an artificial combination of two or more otherwise separated segments of sequence. This artificial combination is often accomplished by chemical synthesis or, more commonly, by the artificial manipulation of isolated segments of nucleic acids, e.g., by genetic engineering techniques such as those described in Sambrook, supra. The term recombinant includes nucleic acids that have been altered solely by addition, substitution, or deletion of a portion of the nucleic acid. Frequently, a recombinant nucleic acid may include a nucleic acid sequence operably linked to a promoter sequence. Such a recombinant nucleic acid may be part of a vector that is used, for example, to transform a cell.

[0650] Alternatively, such recombinant nucleic acids may be part of a viral vector, e.g., based on a vaccinia virus, that could be use to vaccinate a mammal wherein the recombinant nucleic acid is expressed, inducing a protective immunological response in the mammal.

[0651] “Regulatory element” refers to a nucleic acid sequence from nontranslated regions of a gene, and includes enhancers, promoters, introns, and 3′ untranslated regions, which interact with host proteins to carry out or regulate transcription or translation

[0652] “Reporter” molecules are chemical or biochemical moieties used for labeling a nucleic acid, an amino acid, or an antibody. They include radionuclides; enzymes; fluorescent, chemiluminescent, or chromogenic agents; substrates; cofactors; inhibitors; magnetic particles; and other moieties known in the art.

[0653] An “RNA equivalent,” in reference to a DNA sequence, is composed of the same linear sequence of nucleotides as the reference DNA sequence with the exception that all occurrences of the nitrogenous base thymine are replaced with uracil, and the sugar backbone is composed of ribose instead of deoxyribose.

[0654] “Sample” is used in its broadest sense. Samples may contain nucleic or amino acids, antibodies, or other materials, and may be derived from any source (e.g., bodily fluids including, but not limited to, saliva, blood, and urine; chromosome(s), organelles, or membranes isolated from a cell; genomic DNA, RNA, or cDNA in solution or bound to a substrate; and cleared cells or tissues or blots or imprints from such cells or tissues).

[0655] “Specific binding” or “specifically binding” refers to the interaction between a protein or peptide and its agonist, antibody, antagonist, or other binding partner. The interaction is dependent upon the presence of a particular structure of the protein, e.g., the antigenic determinant or epitope, recognized by the binding molecule. For example, if an antibody is specific for epitope “A,” the presence of a polypeptide containing epitope A, or the presence of free unlabeled A, in a reaction containing free labeled A and the antibody will reduce the amount of labeled A that binds to the antibody.

[0656] “Substitution” refers to the replacement of at least one nucleotide or amino acid by a different nucleotide or amino acid.

[0657] “Substrate” refers to any suitable rigid or semi-rigid support including, e.g., membranes, filters, chips, slides, wafers, fibers, magnetic or nonmagnetic beads, gels, tubing, plates, polymers, microparticles or capillaries. The substrate can have a variety of surface forms, such as wells, trenches, pins, channels and pores, to which polynucleotides or polypeptides are bound.

[0658] A “transcript image” refers to the collective pattern of gene expression by a particular tissue or cell type under given conditions at a given time.

[0659] “Transformation” refers to a process by which exogenous DNA enters a recipient cell. Transformation may occur under natural or artificial conditions using various methods well known in the art. Transformation may rely on any known method for the insertion of foreign nucleic acid sequences into a prokaryotic or eukaryotic host cell. The method is selected based on the host cell being transformed.

[0660] “Transformants” include stably transformed cells in which the inserted DNA is capable of replication either as an autonomously replicating plasmid or as part of the host chromosome, as well as cells which transiently express inserted DNA or RNA.

[0661] A “transgenic organism,” as used herein, is any organism, including but not limited to animals and plants, in which one or more of the cells of the organism contains heterologous nucleic acid introduced by way of human intervention, such as by transgenic techniques well known in the art. The nucleic acid is introduced into the cell, directly or indirectly by introduction into a precursor of the cell, by way of deliberate genetic manipulation, such as by microinjection or by infection with a recombinant virus. The term genetic manipulation does not include classical cross-breeding, or in vitro fertilization, but rather is directed to the introduction of a recombinant DNA molecule. The transgenic organisms contemplated in accordance with the present invention include bacteria, cyanobacteria, fungi, and plants and animals. The isolated DNA of the present invention can be introduced into the host by methods known in the art, for example infection, transfection, transformation or transconjugation. Techniques for transferring the DNA of the present invention into such organisms are widely known and provided in references such as Sambrook et al. (1989), supra.

[0662] A “variant” of a particular nucleic acid sequence is defined as a nucleic acid sequence having at least 25% sequence identity to the particular nucleic acid sequence over a certain length of one of the is nucleic acid sequences using blastn with the “BLAST 2 Sequences” tool Version 2.0.9 (May 7, 1999) set at default parameters. Such a pair of nucleic acids may show, for example, at least 30%, at least 50%, at least 60%, at least 70%, at least 80%, at least 90%, at least 95% or even at least 98% or greater sequence identity over a certain defined length. The variant may result in “conservative” amino acid changes which do not affect structural and/or chemical properties. A variant may be described as, for example, an “allelic” (as defined above), “splice,” “species,” or “polymorphic” variant. A splice variant may have significant identity to a reference molecule, but will generally have a greater or lesser number of polynucleotides due to alternate splicing of exons daring mRNA processing. The corresponding polypeptide may possess additional functional domains or lack domains that are present in the reference molecule. Species variants are polynucleotide sequences that vary from one species to another. The resulting polypeptides generally will have significant amino acid identity relative to each other. A polymorphic variant is a variation in the polynucleotide sequence of a particular gene between individuals of a given species. Polymorphic variants also may encompass “single nucleotide polymorphisms” (SNPs) in which the polynucleotide sequence varies by one base. The presence of SNPs may be indicative of, for example, a certain population, a disease state, or a propensity for a disease state.

[0663] In an alternative, variants of the polynucleotides of the present invention may be generated through recombinant methods. One possible method is a DNA shuffling technique such as MOLECULARBREEDING (Maxygen Inc., Santa Clara Calif.; described in U.S. Pat. No. 5,837,458; Chang, C.-C. et al. (1999) Nat Biotechnol. 17:793-797; Christians, F. C. et al. (1999) Nat Biotechnol. 17:259-264; and Crameri, A et al. (1996) Nat Biotechnol. 14:315-319) to alter or improve the biological properties of DITHP, such as its biological or enzymatic activity or its ability to bind to other molecules or compounds. DNA shuffling is a process by which a library of gene variants is produced using PCR-mediated recombination of gene fragments. The library is then subjected to selection or screening procedures that identify those gene variants with the desired properties. These preferred variants may then be pooled and further subjected to recursive rounds of DNA shuffling and selection/screening. Thus, genetic diversity is created through “artificial” breeding and rapid molecular evolution. For example, fragments of a single gene containing random point mutations may be recombined, screened, and then reshuffled until the desired properties are optimized. Alternatively, fragments of a given gene may be recombined with fragments of homologous genes in the same gene family, either from the same or different species, thereby maximizing the genetic diversity of multiple naturally occurring genes in a directed and controllable manner.

[0664] A “variant”^{t} of a particular polypeptide sequence is defined as a polypeptide sequence having at least 40% sequence identity to the particular polypeptide sequence over a certain length of one of the polypeptide sequences using blastp with the “BLAST 2 Sequences” tool Version 2.0.9 (May 7, 1999) set at default parameters. Such a pair of polypeptides may show, for example, at least 50%, at least 60%, at least 70%, at least 80%, at least 90%, at least 95%, or at least 98% or greater sequence identity over a certain defined length of one of the polypeptides.

### THE INVENTION

[0665] In a particular embodiment, cDNA sequences derived from human tissues and cell lines were aligned based on nucleotide sequence identity and assembled into “consensus” or “template” sequences which are designated by the template identification numbers (template IDs) in column 2 of Table 1.

[0666] The sequence identification numbers (SEQ ID NO:s) corresponding to the template IDs are shown in column 1. The template sequences have similarity to GenBank sequences, or “hits,” as designated by the GI Numbers in column 3. The statistical probability of each GenBank hit is indicated by a probability score in column 4, and the functional annotation corresponding to each GenBank hit is listed in column 5.

[0667] The invention incorporates the nucleic acid sequences of these templates as disclosed in the Sequence Listing and the use of these sequences in the diagnosis and treatment of disease states characterized by defects in human molecules. The invention further utilizes these sequences in hybridization and amplification technologies, and in particular, in technologies which assess gene expression patterns correlated with specific cells or tissues and their responses in vivo or in vitro to pharmaceutical agents, toxins, and other treatments. In this manner, the sequences of the present invention are used to develop a transcript image for a particular cell or tissue.

[0668] Derivation of Nucleic Acid Sequences

[0669] cDNA was isolated from libraries constructed using RNA derived from normal and diseased human tissues and cell lines. The human tissues and cell lines used for cDNA library construction were selected from a broad range of sources to provide a diverse population of cDNAs representative of gene transcription throughout the human body. Descriptions of the human tissues and cell lines used for cDNA library construction are provided in the LIFESEQ database (Incyte Genomics, Inc. (Incyte), Palo Alto Calif.). Human tissues were broadly selected from, for example, cardiovascular, dermatologic, endocrine, gastrointestinal, hematopoietic/immune system, musculoskeletal, neural, reproductive, and urologic sources.

[0670] Cell lines used for cDNA library construction were derived from, for example, leukemic cells, teratocarcinomas, neuroepitheliomas, cervical carcinoma, lung fibroblasts, and endothelial cells. Such cell lines include, for example, THP-1, Jurkat, HUVEC, hNT2, WI38, HeLa, and other cell lines commonly used and available from public depositories (American Type Culture Collection, Manassas Va.). Prior to mRNA isolation, cell lines were untreated, treated with a pharmaceutical agent such as 5′-aza-2′-deoxycytidine, treated with an activating agent such as lipopolysaccharide in the case of leukocytic cell lines, or, in the case of endothelial cell lines, subjected to shear stress.

[0671] Sequencing of the cDNAs

[0672] Methods for DNA sequencing are well known in the art. Conventional enzymatic methods employ the Klenow fragment of DNA polymerase I, SEQUENASE DNA polymerase (U.S. Biochemical Corporation, Cleveland Ohio), Taq polymerase (Applied Biosystems, Foster City Calif.), thermostable 17 polymerase (Amersham Pharmacia Biotech, Inc. (Amersham Pharmacia Biotech), Piscataway N.J.), or combinations of polymerases and proofreading exonucleases such as those found in the ELONGASE amplification system (Life Technologies Inc. (Life Technologies), Gaithersburg Md.), to extend the nucleic acid sequence from an oligonucleotide primer annealed to the DNA template of interest Methods have been developed for the use of both single-stranded and double-stranded templates. Chain termination reaction products may be electrophoresed on urea-polyacrylamide gels and detected either by autoradiography (for radioisotope-labeled nucleotides) or by fluorescence (for fluorophore-labeled nucleotides). Automated methods for mechanized reaction preparation, sequencing, and analysis using fluorescence detection methods have been developed Machines used to prepare cDNAs for sequencing can include the MICROLAB 2200 liquid transfer system (Hamilton Company (Hamilton), Reno Nev.), Peltier thermal cycler (PTC200; MJ Research, Inc. (MJ Research), Watertown Mass.), and ABI CATALYST 800 thermal cycler (Applied Biosystems). Sequencing can be carried out using, for example, the ABI 373 or 377 (Applied Biosystems) or MEGABACE 1000 (Molecular Dynamics, Inc. (Molecular Dynamics), Sunnyvale Calif.) DNA sequencing systems, or other automated and manual sequencing systems well known in the art.

[0673] The nucleotide sequences of the Sequence Listing have been prepared by current, state-of-the-art, automated methods and, as such, may contain occasional sequencing errors or unidentified nucleotides. Such unidentified nucleotides are designated by an N. These infrequent unidentified bases do not represent a hindrance to practicing the invention for those skilled in the art. Several methods employing standard recombinant techniques may be used to correct errors and complete the missing sequence information. (See, e.g., those described in Ausubel, F. M. et al. (1997) Short Protocols in Molecular Bioloy, John Wiley & Sons, New York N.Y.; and Sambrook, J. et al. (1989) Molecular Cloning A Laboratory Manual, Cold Spring Harbor Press, Plainview N.Y.)

[0674] Assembly of cDNA Sequences

[0675] Human polynucleotide sequences may be assembled using programs or algorithms well known in the art. Sequences to be assembled are related, wholly or in part, and may be derived-from a single or many different transcripts. Assembly of the sequences can be performed using such programs as PHRAP (Phils Revised Assembly Program) and the GELVIEW fragment assembly system (GCG), or other methods known in the art.

[0676] Alternatively, cDNA sequences are used as “component” sequences that are assembled into “template” or “consensus” sequences as follows. Sequence chromatograms are processed, verified, and quality scores are obtained using PHRED. Raw sequences are edited using an editing pathway known as Block 1 (See, e.g., the LIFESEQ Assembled User Guide, Incyte Genomics, Palo Alto, Calif.). A series of BLAST comparisons is performed and low-information segments and repetitive elements (e.g., dinucleotide repeats, Alu repeats, etc.) are replaced by “n's”, or masked, to prevent spurious matches. Mitochondrial and ribosomal RNA sequences are also removed. The processed sequences are then loaded into a relational database management system (RDMS) which assigns edited sequences to existing templates, if available. When additional sequences are added into the RDMS, a process is initiated which modifies existing templates or creates new templates from works in progress (i.e., nonfinal assembled sequences) containing queued sequences or the sequences themselves. After the new sequences have been assigned to templates, the templates can be merged into bins. If multiple templates exist in one bin, the bin can be split and the templates reannotated.

[0677] Once gene bins have been generated based upon sequence alignments, bins are “clone joined” based upon clone information. Clone joining occurs when the 5′ sequence of one clone is present in one bin and the 3′ sequence from the same clone is present in a different bin, indicating that the two bins should be merged into a single bin. Only bins which share at least two different clones are merged.

[0678] A resultant template sequence may contain either a partial or a full length open reading frame, or all or part of a genetic regulatory element. This variation is due in part to the fact that the full length cDNAs of many genes are several hundred, and sometimes several thousand, bases in length. With current technology, cDNAs comprising the coding regions of large genes cannot be cloned because of vector limitations, incomplete reverse transcription of the mRNA, or incomplete “second strand” synthesis. Template sequences may be extended to include additional contiguous sequences derived from the parent RNA transcript using a variety of methods known to those of skill in the art. Extension may thus be used to achieve the full length coding sequence of a gene.

[0679] Analysis of the cDNA Sequences

[0680] The cDNA sequences are analyzed using a variety of programs and algorithms which are well known in the art. (See, e.g., Ausubel, 1997, sutra, Chapter 7.7; Meyers, R. A. (Ed.) (1995) Molecular Biology and Biotechnology, Wiley VCH, New York N.Y., pp. 856-853; and Table 7.) These analyses comprise both reading frame determinations, e.g., based on triplet codon periodicity for particular organisms (Fickett, J. W. (1982) Nucleic Acids Res. 10:5303-5318); analyses of potential start and stop codons; and homology searches.

[0681] Computer programs known to those of skill in the art for performing computer-assisted searches for amino acid and nucleic acid sequence similarity, include, for example, Basic Local Alignment Search Tool (BLAST; Altschul, S. F. (1993) J. Mol. Evol. 36:290-300; Altschul, S. F. et al. (1990) J. Mol. Biol. 215:403410). BLAST is especially useful in determining exact matches and comparing two sequence fragments of arbitrary but equal lengths, whose alignment is locally maximal and for which the alignment score meets or exceeds a threshold or cutoff score set by the user (Karlin, S. et al. (1988) Proc. Natl. Acad. Sci. USA 85:841-845). Using an appropriate search tool (e.g., BLAST or HMM), GenBank, SwissProt, BLOCKS, PFAM and other databases may be searched for sequences containing regions of homology to a query dithp or DITHP of the present invention.

[0682] Other approaches to the identification, assembly, storage, and display of nucleotide and polypeptide sequences are provided in “Relational Database for Storing Biomolecule Infomation,” U.S. Ser. No. 08/947,845, filed Oct. 9, 1997; “Project-Based Full-Length Biomolecular Sequence Database,” U.S. Ser. No. 08/811,758, filed Mar. 6, 1997; and “Relational Database and System for Storing Information Relating to Biomolecular Sequences,” U.S. Ser. No. 09/034,807, filed Mar. 4, 1998, all of which are incorporated by reference herein in their entirety.

[0683] Protein hierarchies can be assigned to the putative encoded polypeptide based on, e.g., motif, BLAST, or biological analysis. Methods for assigning these hierarchies are described, for example, in “Database System Employing Protein Function Hierarchies for Viewing Biomolecular Sequence Data,” U.S. Ser. No. 08/812,290, filed Mar. 6, 1997, incorporated herein by reference.

[0684] Identification of Human Diagnostic and Therapeutic Molecules Encoded by dithp

[0685] The identities of the DITHP encoded by the dithp of the present invention were obtained by analysis of the assembled cDNA sequences. SEQ ID NO:212, SEQ ID NO:213, SEQ ID NO:214, SEQ ID NO:215, SEQ ID NO:216, SEQ ID NO:217, SEQ ID NO:218, SEQ ID NO:219, SEQ ID NO:220, SEQ ID NO:221, SEQ ID NO:222, and SEQ ID NO:223, encoded by SEQ ID NO:1, SEQ ID NO:2, SEQ ID NO:3, SEQ ID NO:4, SEQ ID NO:5, SEQ ID NO:6, SEQ ID NO:7, SEQ ID NO:8, SEQ ID NO:9, SEQ ID NO:10, SEQ ID NO:11, and SEQ ID NO:12, respectively, are, for example, human enzyme molecules.

[0686] SEQ ID NO:224, SEQ ID NO:225, SEQ ID NO:226, SEQ ID NO:227, and SEQ ID NO:228, encoded by SEQ ID NO:13, SEQ ID NO:14, SEQ ID NO:15, SEQ ID NO:16, and SEQ ID NO:17, respectively, are, for example, receptor molecules.

[0687] SEQ ID NO:229, SEQ ID NO:230, SEQ ID NO:231, SEQ ID NO:232, SEQ ID NO:233, SEQ ID NO:234, SEQ ID NO:235, SEQ ID NO:236, SEQ ID NO:237, SEQ ID NO:238, SEQ ID NO:239, SEQ ID NO:240, and SEQ ID NO:241, encoded by SEQ ID NO:18, SEQ ID NO:19, SEQ ID NO:20, SEQ ID NO:21, SEQ ID NO:22, SEQ ID NO:23, SEQ ID NO:24, SEQ ID NO:25, SEQ ID NO:26, SEQ ID NO:27, SEQ ID NO:28, SEQ ID NO:29, and SEQ ID NO:30, respectively, are, for example, intracellular signaling molecules.

SEQ ID NO:242, SEQ ID NO:243, SEQ ID NO:244, SEQ ID NO:245, SEQ ID NO:246,
SEQ ID NO:247, SEQ ID NO:248, SEQ ID NO:249, SEQ ID NO:250, SEQ ID NO:251, SEQ ID
NO:252, SEQ ID NO:253, SEQ ID NO:254, SEQ ID NO:255, SEQ ID NO:256, SEQ ID NO:257,
SEQ ID NO:258, SEQ ID NO:259, SEQ ID NO:260, SEQ ID NO:261, SEQ ID NO:262, SEQ ID
NO:263, SEQ ID NO:264, SEQ ID NO:265, SEQ ID NO:266, SEQ ID NO:267, SEQ ID NO:268,
SEQ ID NO:269, SEQ ID NO:270, SEQ ID NO:271, SEQ ID NO:272, SEQ ID NO:273, SEQ ID
NO:274, SEQ ID NO:275, SEQ ID NO:276, SEQ ID NO:277, SEQ ID NO:278, SEQ ID NO:279,
SEQ ID NO:280, SEQ ID NO:281, SEQ ID NO:282, SEQ ID NO:283, SEQ ID NO:284, SEQ ID
NO:285, SEQ ID NO:286, SEQ ID NO:287, SEQ ID NO:288, SEQ ID NO:289, SEQ ID NO:290,
SEQ ID NO:291, SEQ ID NO:292, SEQ ID NO:293, SEQ ID NO:294, SEQ ID NO:295, SEQ ID
NO:296, SEQ ID NO:297, SEQ ID NO:298, SEQ ID NO:299, SEQ ID NO:300, SEQ ID NO:301,
SEQ ID NO:302, SEQ ID NO:303, SEQ ID NO:304, SEQ ID NO:305, SEQ ID NO:306, SEQ ID
NO:307, SEQ ID NO:308, and SEQ ID NO:309, encoded by SEQ ID NO:31, SEQ ID NO:32, SEQ
ID NO:33, SEQ ID NO:34, SEQ ID NO:35, SEQ ID NO:36, SEQ ID NO:37, SEQ ID NO:38, SEQ
ID NO:39, SEQ ID NO 40, SEQ ID NO:41, SEQ ID NO:42, SEQ ID NO:43, SEQ ID NO:44, SEQ
ID NO:45, SEQ ID NO:46, SEQ ID NO:47, SEQ ID NO:48, SEQ ID NO:49, SEQ ID NO:50, SEQ
ID NO:51, SEQ ID NO:52, SEQ ID NO:53, SEQ ID NO:54, SEQ ID NO:55, SEQ ID NO:56, SEQ
ID NO:57, SEQ ID NO:58, SEQ ID NO:59, SEQ ID NO:60, SEQ ID NO:61, SEQ ID NO:62, SEQ
ID NO:63, SEQ ID NO:64, SEQ ID NO:65, SEQ ID NO:66, SEQ ID NO:67, SEQ ID NO:68, SEQ
ID NO:69, SEQ ID NO:70, SEQ ID NO:71, SEQ ID NO:72, SEQ ID NO:73, SEQ ID NO:74, SEQ
ID NO:75, SEQ ID NO:76, SEQ ID NO:77, SEQ ID NO:78, SEQ ID NO:79, SEQ ID NO:S0, SEQ
ID NO:81, SEQ ID NO:82, SEQ ID NO:83, SEQ ID NO:84, SEQ ID NO:85, SEQ ID NO:86, SEQ
ID NO:87, SEQ ID NO:88, SEQ ID NO:89, SEQ ID NO:90, SEQ ID NO:91, SEQ ID NO:92, SEQ
ID NO:93, SEQ ID NO:94, SEQ ID NO:95, SEQ ID NO:96, SEQ ID NO:97, and SEQ ID NO:98,

[0688] respectively, are, for example, transcription factor molecules.

[0689] SEQ ID NO:310, SEQ ID NO:311, SEQ ID NO:312, SEQ ID NO:313, SEQ ID NO:314, SEQ ID NO:315, SEQ ID NO:316, and SEQ ID NO:317, encoded by SEQ ID NO:99, SEQ ID NO:100, SEQ ID NO:101, SEQ ID NO:102, SEQ ID NO:103, SEQ ID NO:104, SEQ ID NO:105, and SEQ ID NO:106, respectively, are, for example, membrane transport molecules.

[0690] SEQ ID NO:318, SEQ ID NO:319, SEQ ID NO:320, SEQ ID NO:321, SEQ ID NO:322,

[0691] SEQ ID NO:323, SEQ ID NO:324, SEQ ID NO:325, SEQ ID NO:326, and SEQ ID NO:327, encoded by SEQ ID NO:107, SEQ ID NO:108, SEQ ID NO:109, SEQ ID NO:110, SEQ ID NO:111, SEQ ID NO:112, SEQ ID NO:113, SEQ ID NO:114, SEQ ID NO:115, and SEQ ID NO:116, respectively, are, for example, protein modification and maintenance molecules.

[0692] SEQ ID NO:328, SEQ ID NO:329, SEQ ID NO:330, SEQ ID NO:331, SEQ ID NO:332, SEQ ID NO:333, SEQ ID NO:334, SEQ ID NO:335, SEQ ID NO:336, SEQ ID NO:337, SEQ ID NO:338, SEQ ID NO:339, SEQ ID NO:340, and SEQ ID NO:341, encoded by SEQ ID NO:117, SEQ ID NO:118, SEQ ID NO:119, SEQ ID NO:120, SEQ ID NO:121, SEQ ID NO:122, SEQ ID NO:123, SEQ ID NO:124, SEQ ID NO:125, SEQ ID NO:126, SEQ ID NO:127, SEQ ID NO:128, SEQ ID NO:129, and SEQ ID NO:130, respectively, are, for example, nucleic acid synthesis and modification molecules.

[0693] SEQ ID NO:342, encoded by SEQ ID NO:131 is, for example, an adhesion molecule. SEQ ID NO:343, SEQ ID NO:344, SEQ ID NO:345, SEQ ID NO:346, SEQ ID NO:347,

[0694] SEQ ID NO:348, and SEQ ID NO:349, encoded by SEQ ID NO:132, SEQ ID NO:133, SEQ ID NO:134, SEQ ID NO:135, SEQ ID NO:136, SEQ ID NO:137, and SEQ ID NO:138, respectively, are, for example, antigen recognition molecules.

[0695] SEQ ID NO:350, SEQ ID NO:351, SEQ ID NO:352, and SEQ ID NO:353, encoded by SEQ ID NO:139, SEQ ID NO:140, SEQ ID NO:141, and SEQ ID NO:142, respectively, are, for example, electron transfer associated molecules.

[0696] SEQ ID NO:354, SEQ ID NO:355, SEQ ID NO:356, SEQ ID NO:357, SEQ ID NO:358, and SEQ ID NO:359, encoded by SEQ ID NO:143, SEQ ID NO:144, SEQ ID NO:145, SEQ ID NO:146, SEQ ID NO:147, and SEQ ID NO:148, respectively, are, for example, secreted/extracellular matrix molecules.

[0697] SEQ ID NO:360, SEQ ID NO:361, SEQ ID NO:362, SEQ ID NO:363, SEQ ID NO:364, SEQ ID NO:365, SEQ ID NO:366, SEQ ID NO:367, SEQ ID NO:368, and SEQ ID NO:369, encoded by SEQ ID NO:149, SEQ ID NO:150, SEQ ID NO:151, SEQ ID NO:152, SEQ ID NO:153, SEQ ID NO:154, SEQ ID NO:155, SEQ ID NO:156, SEQ ID NO:157, and SEQ ID NO:158, respectively, are, for example, cytoskeletal molecules.

[0698] SEQ ID NO:370, SEQ ID NO:371, SEQ ID NO:372, and SEQ ID NO:373, encoded by SEQ ID NO:159, SEQ ID NO:160, SEQ ID NO:161, and SEQ ID NO:162, respectively, are, for example, cell membrane molecules.

[0699] SEQ ID NO:374, SEQ ID NO:375, SEQ ID NO:376, SEQ ID NO:377, SEQ ID NO:378, SEQ ID NO:379, SEQ ID NO:380, SEQ ID NO:381, SEQ ID NO:382, SEQ ID NO:383, SEQ ID NO:384, SEQ ID NO:385, SEQ ID NO:386, SEQ ID NO:387, SEQ ID NO:388, SEQ ID NO:389, SEQ ID NO:390, SEQ ID NO:391, and SEQ ID NO:392, encoded by SEQ ID NO:163, SEQ ID NO:164, SEQ ID NO:165, SEQ ID NO:166, SEQ ID NO:167, SEQ ID NO:168, SEQ ID NO:169, SEQ ID NO:170, SEQ ID NO:171, SEQ ID NO:172, SEQ ID NO:173, SEQ ID NO:174, SEQ ID NO:175, SEQ ID NO:176, SEQ ID NO:177, SEQ ID NO:178, SEQ ID NO:179, SEQ ID NO:180, and SEQ ID NO:181, respectively, are, for example, ribosomal molecules.

[0700] SEQ ID NO:393, SEQ ID NO:394, SEQ ID NO:395, SEQ ID NO:396, SEQ ID NO:397, SEQ ID NO:398, SEQ ID NO:399, SEQ ID NO:400, SEQ ID NO:401, SEQ ID NO:402, and SEQ ID NO:403, encoded by SEQ ID NO:182, SEQ ID NO:183, SEQ ID NO:184, SEQ ID NO:185, SEQ ID NO:186, SEQ ID NO:187, SEQ ID NO:188, SEQ ID NO:189, SEQ ID NO:190, SEQ ID NO:191, and SEQ ID NO:192, respectively, are, for example, organelle associated molecules.

[0701] SEQ ID NO:404, SEQ ID NO:405, SEQ ID NO:406, SEQ ID NO:407, SEQ ID NO:408, SEQ ID NO:409, SEQ ID NO:410, SEQ ID NO:411, SEQ ID NO-0.412, SEQ ID NO:413, and SEQ ID NO:414, encoded by SEQ ID NO:193, SEQ ID NO:194, SEQ ID NO:195, SEQ ID NO:196, SEQ ID NO:197, SEQ ID NO:198, SEQ ID NO:199, SEQ ID NO:200, SEQ ID NO:201, SEQ ID NO:202, and SEQ ID NO:203, respectively, are; for example, biochemical pathway molecules.

[0702] SEQ ID NO:415, SEQ ID NO:416, SEQ ID NO:417, SEQ ID NO:418, SEQ ID NO:419,

[0703] SEQ ID NO:420, SEQ ID NO:421, and SEQ ID NO:422, encoded by SEQ ID NO:204, SEQ ID NO:205, SEQ ID NO:206, SEQ ID NO:207, SEQ ID NO:208, SEQ ID NO:209, SEQ ID NO:210, and SEQ ID NO:211, respectively, are, for example, molecules associated with growth and development

[0704] Sequences of Hunan Diagnostic and Therapeutic Molecules

[0705] The dithp of the present invention may be used for a variety of diagnostic and therapeutic purposes. For example, a dithp may be used to diagnose a particular condition, disease, or disorder associated with human molecules. Such conditions, diseases, and disorders include, but are not limited to, a cell proliferative disorder, such as actinic keratosis, arteriosclerosis, atherosclerosis, bursitis, cirrhosis, hepatitis, mixed connective tissue disease (MCTD), myelofibrosis, paroxysmal nocturnal hemoglobinuria, polycythemia vera, psoriasis, primary thrombocythemia, and cancers including adenocarcinoma, leukemia, lymphoma, melanoma, myeloma, sarcoma, teratocarcinoma, and, in particular, a cancer of the adrenal gland, bladder, bone, bone marrow, brain, breast cervix, gall bladder, ganglia, gastrointestinal tract, heart, kidney, liver, lung, muscle, ovary, pancreas, parathyroid, penis, prostate, salivary glands, skin, spleen, testis, thymus, thyroid, and uterus; an autoimmune/inflammatory disorder, such as inflammation, actinic keratosis, acquired immunodeficiency syndrome (AIDS), Addison's disease, adult respiratory distress syndrome, allergies, ankylosing spondylitis, amyloidosis, anemia, arteriosclerosis, asthma, atherosclerosis, autoimmune hemolytic anemia, autoimmune thyroiditis, bronchitis, bursitis, cholecystitis, cirrhosis, contact dermatitis, Crohn's disease, atopic dermatitis, dermatomyositis, diabetes mellitus, emphysema, erythroblastosis fetalis, erythema nodosum, atrophic gastritis, glomerulonephritis, Goodpasture's syndrome, gout, Graves' disease, Hashimoto's thyroiditis, paroxysmal nocturnal hemoglobinuria, hepatitis, hypereosinophilia, irritable bowel syndrome, episodic lymphopenia with lymphocytotoxins, mixed connective tissue disease (MCTD), multiple sclerosis, myasthenia gravis, myocardial or pericardial inflammation, myelofibrosis, osteoarthritis, osteoporosis, pancreatitis, polycythemia vera, polymyositis, psoriasis, Reiter's syndrome, rheumatoid arthritis, scleroderma, Sjögren's syndrome, systemic anaphylaxis, systemic lupus erythematosus, systemic sclerosis, primary thrombocythemia, thrombocytopenic purpura, ulcerative colitis, uveitis, Werner syndrome, complications of cancer, hemodialysis, and extracorporeal circulation, trauma, and hematopoietic cancer including lymphoma, leukemia, and myeloma; an infection caused by a viral agent classified as adenovinis, arenavirus, bunyavirus, calicivirus, coronavirus, filovirus, hepadnavirus, herpesvirus, flavivirus, orthomyxovirus, parvovirus, papovavirus, paramyxovirus, picornavirus, poxvirus, reovirus, retrovirus, rhabdovirus, or togavirus; an infection caused by a bacterial agent classified as pneumococcus, staphylococcus, streptococcus, bacillus, corynebacterium, clostridium, meningococcus, gonococcus, listeria, moraxella, kingella, haemophilus, legionella, bordetella, gram-negative enterobacterium including shigella, salmonella, or campylobacter, pseudomonas, vibrio, brucella, francisella, yersinia, bartonella, norcardium, actinomyces, mycobacterium, spirochaetale, rickettsia, chlamydia, or mycoplasma; an infection caused by a fuingal agent classified as aspergillus, blastomyces, dermatophytes, cryptococcus, coccidioides, malasezzia, histoplasma, or other mycosis-causing fungal agent; and an infection caused by a parasite classified as plasmodium or malaria-causing, parasitic entamoeba, leisbmania, trypanosoma, toxoplasma, pneumocystis carinii, intestinal protozoa such as giardia, trichomonas, tissue nematode such as trichinella, intestinal nematode such as ascaris, lymphatic filarial nematode, trematode such as schistosoma, and cestrode such as tapeworm; a developmental disorder such as renal tubular acidosis, anemia, Cushing's syndrome, achondroplastic dwarfism, Duchenne and Becker muscular dystrophy, epilepsy, gonadal dysgenesis, WAGR syndrome (Wilms' tumor, aniridia, genitourinary abnormalities, and mental retardation), Smith-Magenis syndrome, myelodysplastic syndrome, hereditary mucoepithelial dysplasia, hereditary keratodermas, hereditary neuropathies such as Charcot-Marie-Tooth disease and neurofibromatosis, hypothyroidism, hydrocephalus, seizure disorders such as Syndenham's chorea and cerebral palsy, spina bifida, anencephaly, craniorachischisis, congenital glaucoma, cataract, and sensorineural hearing loss; an endocrine disorder such as a disorder of the hypothalamus and/or pituitary resulting from lesions such as a primary brain tumor, adenoma, infarction associated with pregnancy, hypophysectomy, aneurysm, vascular malformation, thrombosis, infection, immunological disorder, and complication due to head trauma; a disorder associated with hypopituitarism including hypogonadism, Sheehan syndrome, diabetes insipidus, Kallman's disease, Hand-Schuller-Christian disease, Letterer-Siwe disease, sarcoidosis, empty sella syndrome, and dwarfism; a disorder associated with hyperpituitarism including acromegaly, giantism, and syndrome of inappropriate antidiuretic hormone (ADH) secretion (SIADH) often caused by benign adenoma; a disorder associated with hypothyroidism including goiter, myxedema, acute thyroiditis associated with bacterial infection, subacute thyroiditis associated with viral infection, autoimmune thyroiditis (Hashimoto's disease), and cretinism; a disorder associated with hyperthyroidism including thyrotoxicosis and its various forms, Grave's disease, pretibial myxedema, toxic multinodular goiter, thyroid carcinoma, and Plummer's disease; a disorder associated with hyperparathyroidism including Corn disease (chronic hypercalemia); a pancreatic disorder such as Type I or Type II diabetes mellitus and associated complications; a disorder associated with the adrenals such as hyperplasia, carcinoma, or adenoma of the adrenal cortex, hypertension associated with alkalosis, amyloidosis, hypokalemia, Gushing's disease, Liddle's syndrome, and Arnold-Healy-Gordon syndrome, pheochromocytoma tumors, and Addison's disease; a disorder associated with gonadal steroid hormones such as: in women, abnormal prolactin production, infertility, endometriosis, perturbation of the menstrual cycle, polycystic ovarian disease, hyperprolactinemia, isolated gonadotropin deficiency, amenorrhea, galactorrhea, hermaphroditism, hirsutism and virilization, breast cancer, and, in post-menopausal women, osteoporosis; and, in men, Leydig cell deficiency, male climacteric phase, and germinal cell aplasia, a hypergonadal disorder associated with Leydig cell tumors, androgen resistance associated with absence of androgen receptors, syndrome of 5 α-reductase, and gynecomastia; a metabolic disorder such as Addison's disease, cerebrotendinous xanthomatosis, congenital adrenal hyperplasia, coumarin resistance, cystic fibrosis, diabetes, fatty hepatocirrhosis, fructose-1,6-diphosphatase deficiency, galactosemia, goiter, glucagonoma, glycogen storage diseases, hereditary fructose intolerance, hyperadrenalism, hypoadrenalism, hyperparathyroidism, hypoparathyroidism, hypercholesterolemia, hyperthyroidism, hypoglycemia, hypothyroidism, hyperlipidemia, hyperlipemia, lipid myopathies, lipodystrophies, lysosomal storage diseases, mannosidosis, neuraminidase deficiency, obesity, pentosuria phenylketonuria, pseudovitamin D-deficiency rickets; disorders of carbohydrate metabolism such as congenital type II dyseryhropoietic anemia, diabetes, insulin-dependent diabetes mellitus, non-insulin-dependent diabetes mellitus, fructose-1,6diphosphatase deficiency, galactosemia, glucagonoma, hereditary fructose intolerance, hypoglycemia, mannosidosis, neuraminidase deficiency, obesity, galactose epimerase deficiency, glycogen storage diseases, lysosomal storage diseases, fructosuria, pentosuria, and inherited abnormalities of pyruvate metabolism; disorders of lipid metabolism such as fatty liver, cholestasis, primary biliary cirrhosis, carnitine deficiency, carnitine palmitoyltransferase deficiency, myoadenylate deaminase deficiency, hypertriglyceridemia, lipid storage disorders such Fabry's disease, Gaucher's disease, Niemann-Pick's disease, metachromatic leukodystrophy, adrenoleukodystrophy, GM₂ gangliosidosis, and ceroid lipofuscinosis, abetalipoproteinemia, Tangier disease, hyperlipoproteinemia, diabetes mellitus, lipodystrophy, lipomatoses, acute panniculitis, disseminated fat necrosis, adiposis dolorosa, lipoid adrenal hyperplasia, minimal change disease, lipomas, atherosclerosis, hypercholesterolemia, hypercholesterolemia with hypertriglyceridemia, primary hypoalphalipoproteinemia, hypothyroidism, renal disease, liver disease, lecithin:cholesterol acyltransferase deficiency, cerebrotendinous xanthomatosis, sitosterolemia, hypocholesterolemia, Tay-Sachs disease, Sandhoff's disease, hyperlipidemia, hyperlipemia, lipid myopathies, and obesity; and disorders of copper metabolism such as Menke's disease, Wilson's disease, and Ehlers-Danlos syndrome type IX; a neurological disorder such as epilepsy, ischemic cerebrovascular disease, stroke, cerebral neoplasms, Alzheimer's disease, Pick's disease, Huntington's disease, dementia, Parkinson's disease and other extrapyramidal disorders, amyotrophic lateral sclerosis and other motor neuron disorders, progressive neural muscular atrophy, retinitis pigmentosa, hereditary ataxias, multiple sclerosis and other demyelinating diseases, bacterial and viral meningitis, brain abscess, subdural empyema, epidural abscess, suppurative intracranial thrombophlebitis, myelitis and radiculitis, viral central nervous system disease, prion diseases including kuru, Creutzfeldt-Jakob disease, and Gerstmann-Straussler-Scheinker syndrome, fatal familial insomnia, nutritional and metabolic diseases of the nervous system, neurofibromatosis, tuberous sclerosis, cerebelloretinal hemangioblastomatosis, encephalotrigeminal syndrome, mental retardation and other developmental disorder of the central nervous system, cerebral palsy, a neuroskeletal disorder, an autonomic nervous system disorder, a cranial nerve disorder, a spinal cord disease, muscular dystrophy and other neuromuscular disorder, a peripheral nervous system disorder, dermatomyositis and polymyositis, inherited, metabolic, endocrine, and toxic myopathy, myasthenia gravis, periodic paralysis, a mental disorder including mood, anxiety, and schizophrenic disorders, seasonal affective disorder (SAD), akathesia, amnesia, catatonia, diabetic neuropathy, tardive dyskinesia, dystonias, paranoid psychoses, postherpetic neuralgia, and Tourette's disorder; a gastrointestinal disorder including ulcerative colitis, gastric and duodenal ulcers, cystinuria, dibasicaminoaciduria, hypercystinuria, lysinuria, hartnup disease, tryptophan malabsorption, methionine malabsorption, hissidinuria, iminoglycinuria, dicarboxylicaminoaciduria, cystinosis, renal glycosuria, hypouricemia, familial hypophophatemic rickets, congenital chloridorrhea, distal renal tubular acidosis, Menkes' disease, Wilson's disease, lethal diarrhea, juvenile pernicious anemia, folate malabsorption, adrenoleukodystrophy, hereditary myoglobinuria, and Zellweger syndrome; a transport disorder such as akinesia, amyotrophic lateral sclerosis, ataxia telangiectasia, cystic fibrosis, Becker's muscular dystrophy, Bell's palsy, Charcot-Marie Tooth disease, diabetes mellitus, diabetes insipidus, diabetic neuropathy, Duchenne muscular dystrophy, hyperkalemic periodic paralysis, normokalemic periodic paralysis, Parkinson's disease, malignant hyperthermia, multidrug resistance, myasthenia gravis, myotonic dystrophy, catatonia, tardive dyskinesia, dystonias, peripheral neuropathy, cerebral neoplasms, prostate cancer, cardiac disorders associated with transport, e.g., angina, bradyarrythmia, tachyarrymia, hypertension, Long QT syndrome, myocarditis, cardiomyopathy, nemaline myopathy, centronuclear myopathy, lipid myopathy, mitochondrial myopathy, thyrotoxic myopathy, ethanol myopathy, dermatomyositis, inclusion body myositis, infectious myositis, and polymyositis, neurological disorders associated with transport, e.g., Alzheimer's disease, amnesia, bipolar disorder, dementia, depression, epilepsy, Tourette's disorder, paranoid psychoses, and schizophrenia, and other disorders associated with transport, e.g., neurofibromatosis, postherpetic neuralgia, trigeminal neuropathy, sarcoidosis, sickle cell anemia, cataracts, infertility, pulmonary artery stenosis, sensorineural autosomal deafness, hyperglycemia, hypoglycemia, Grave's disease, goiter, glucose-galactose malabsorption syndrome, hypercholesterolemia, Cushing's disease, and Addison's disease; and a connective tissue disorder such as osteogenesis imperfecta, Ehlers-Danlos syndrome, chondrodysplasias, Marfan syndrome, Alport syndrome, familial aortic aneurysm, achondroplasia, mucopolysaccharidoses, osteoporosis, osteopetrosis, Paget's disease, rickets, osteomalacia, hyperparathyroidism, renal osteodystrophy, osteonecrosis, osteomyelitis, osteoma, osteoid osteoma, osteoblastoma, osteosarcoma, osteochondroma, chondroma, chondroblastoma, chondromyxoid fibroma, chondrosarcoma, fibrous cortical defect, nonossifying fibroma, fibrous dysplasia, fibrosarcoma, malignant fibrous histiocytoma, Ewing's sarcoma, primitive neuroectodermal tumor, giant cell tumor, osteoarthritis, rheumatoid arthritis, ankylosing spondyloarthritis, Reiter's syndrome, psoriatic arthritis, enteropathic arthritis, infectious arthritis, gout, gouty arthritis, calcium pyrophosphate crystal deposition disease, ganglion, synovial cyst, villonodular synovitis, systemic sclerosis, Dupuytren's contracture, hepatic fibrosis, lupus erythematosus, mixed connective tissue disease, epidermolysis bullosa simplex, bullous congenital ichthyosiform erythroderma (epidermolytic hyperkeratosis), non-epidermolytic and epidermolytic palmoplantar keratoderma, ichthyosis bullosa of Siemens, pachyonycnia congenita, and white sponge nevus. The dithp can be used to detect the presence of, or to quantify the amount of, a dithp-related polynucleotide in a sample. This information is then compared to information obtained from appropriate reference samples, and a diagnosis is established. Alternatively, a polynucleotide complementary to a given dithp can inhibit or inactivate a therapeutically relevant gene related to the dithp.

[0706] Analysis of dithp Expression Patterns

[0707] The expression of dithp may be routinely assessed by hybridization-based methods to determine, for example, the tissue-specificity, disease-specificity, or developmental stage-specificity of dithp expression. For example, the level of expression of dithp may be compared among different cell types or tissues, among diseased and normal cell types or tissues, among cell types or tissues at different developmental stages, or among cell types or tissues undergoing various treatments. This type of analysis is useful, for example, to assess the relative levels of dithp expression in fully or partially differentiated cells or tissues, to determine if changes in dithp expression levels are correlated with the development or progression of specific disease states, and to assess the response of a cell or tissue to a specific therapy, for example, in pharmacological or toxicological studies. Methods for the analysis of dithp expression are based on hybridization and amplification technologies and include membrane-based procedures such as northern blot analysis, high-throughput procedures that utilize, for example, microarrays, and PCR-based procedures.

[0708] Hybridization and Genetic Analysis

[0709] The dithp, their fragments, or complementary sequences, may be used to identify the presence of and/or to determine the degree of similarity between two (or more) nucleic acid sequences. The dithp may be hybridized to naturally occurring or recombinant nucleic acid sequences under appropriately selected temperatures and salt concentrations. Hybridization with a probe based on the nucleic acid sequence of at least one of the dithp allows for the detection of nucleic acid sequences, including genomic sequences, which are identical or related to the dithp of the Sequence Listing. Probes may be selected from non-conserved or unique regions of at least one of the polynucleotides of SEQ ID NO:1-211 and tested for their ability to identity or amplify the target nucleic acid sequence using standard protocols.

[0710] Polynucleotide sequences that are capable of hybridizing, in particular, to those shown in SEQ ID NO:1-211 and fragments thereof, can be identified using various conditions of stringency. (See, e.g., Wahl, G. M. and S. L. Berger (1987) Methods Enzymol. 152:399-407; Kimmel, AR. (1987) Methods Enzymol. 152:507-511.) Hybridization conditions are discussed in “Definitions.”

[0711] A probe for use in Southern or northern hybridization may be derived from a fragment of a dithp sequence, or its complement, that is up to several hundred nucleotides in length and is either single-stranded or double-stranded. Such probes may be hybridized in solution to biological materials such as plasmids, bacterial, yeast, or human artificial chromosomes, cleared or sectioned tissues, or to artificial substrates containing dithp. Microarrays are particularly suitable for identifying the presence of and detecting the level of expression for multiple genes of interest by examining gene expression correlated with, e.g., various stages of development, treatment with a drug or compound, or disease progression. An array analogous to a dot or slot blot may be used to arrange and link polynucleotides to the surface of a substrate using one or more of the following: mechanical (vacuum), chemical, thermal, or UV bonding procedures. Such an array may contain any number of dithp and may be produced by hand or by using available devices, materials, and machines.

[0712] Microarrays may be prepared, used, and analyzed using methods known in the art. (See, e.g., Brennan, T. M. et al. (1995) U.S. Pat. No. 5,474,796; Schena, M. et al. (1996) Proc. Natl. Acad. Sci. USA 93:10614-10619; Baldeschweiler et al. (1995) PCT application WO95/251116; Shalon, D. et al. (1995) PCT application WO95/35505; Heller, R. A. et al. (1997) Proc. Natl. Acad. Sci. USA 94:2150-2155; and Heller, M. J. et al. (1997) U.S. Pat. No. 5,605,662.)

[0713] Probes may be labeled by either PCR or enzymatic techniques using a variety of commercially available reporter molecules. For example, commercial kits are available for radioactive and chemiluminescent labeling (Amersham Pharmacia Biotech) and for alkaline phosphatase labeling (Life Technologies). Alternatively, dithp may be cloned into commercially available vectors for the production of RNA probes. Such probes may be transcribed in the presence of at least one labeled nucleotide (e.g., ³²P-ATP, Amersham Pharmacia Biotech).

[0714] Additionally the polynucleotides of SEQ ID NO:1-211 or suitable fragments thereof can be used to isolate full length cDNA sequences utilizing hybridization and/or amplification procedures well known in the art, e.g., cDNA library screening, PCR amplification, etc. The molecular cloning of such full length cDNA sequences may employ the method of cDNA library screening with probes using the hybridization, stringency, washing, and probing strategies described above and in Ausubel, supra, Chapters 3, 5, and 6. These procedures may also be employed with genomic libraries to isolate genomic sequences of dithp in order to analyze, e.g., regulatory elements.

[0715] Genetic Mapping

[0716] Gene identification and mapping are important in the investigation and treatment of almost all conditions, diseases, and disorders. Cancer, cardiovascular disease, Alzheimer's disease, arthritis, diabetes, and mental illnesses are of particular interest. Each of these conditions is more complex than the single gene defects of sickle cell anemia or cystic fibrosis, with select groups of genes being predictive of predisposition for a particular condition, disease, or disorder. For example, cardiovascular disease may result from malfunctioning receptor molecules that fail to clear cholesterol from the bloodstream, and diabetes may result when a particular individual's immune system is activated by an infection and attacks the insulin-producing cells of the pancreas. In some studies, Alzieimer's disease has been linked to a gene on chromosome 21; other studies predict a different gene and location. Mapping of disease genes is a complex and reiterative process and generally proceeds from genetic linkage analysis to physical mapping.

[0717] As a condition is noted among members of a family, a genetic linkage map traces parts of chromosomes that are inherited in the same pattern as the condition. Statistics link the inheritance of particular conditions to particular regions of chromosomes, as defined by RFLP or other markers. (See, for example, Lander, E. S. and Botstein, D. (1986) Proc. Natl. Acad. Sci. USA 83:7353-7357.) Occasionally, genetic markers and their locations are known from previous studies. More often, however, the markers are simply stretches of DNA that differ among individuals. Examples of genetic linkage maps can be found in various scientific journals or at the Online Mendelian Inheritance in Man (OMIM) World Wide Web site.

[0718] In another embodiment of the invention, dithp sequences may be used to generate hybridization probes useful in chromosomal mapping of naturally occurring genomic sequences. Either coding or noncoding sequences of dithp may be used, and in some instances, noncoding sequences may be preferable over coding sequences. For example, conservation of a dithp coding sequence among members of a multi-gene family may potentially cause undesired cross hybridization during chromosomal mapping. The sequences may be mapped to a particular chromosome, to a specific region of a chromosome, or to artificial chromosome constructions, e.g., human artificial chromosomes (HACs), yeast artificial chromosomes (YACs), bacterial artificial chromosomes (BACs), bacterial P1 constructions, or single chromosome cDNA libraries. (See, e.g., Harrington, J. J. et al. (1997) Nat Genet. 15:345-355; Price, C. M. (1993) Blood Rev. 7:127-134; and Trask, B. J. (1991) Trends Genet. 7:149-154.)

[0719] Fluorescent in situ hybridization (FISH) may be correlated with other physical chromosome mapping techniques and genetic map data. (See, e.g., Meyers, supra, pp. 965-968.) Correlation between the location of dithp on a physical chromosomal map and a specific disorder, or a predisposition to a specific disorder, may help define the region of DNA associated with that disorder. The dithp sequences may also be used to detect polymorphisms that are genetically linked to the inheritance of a particular condition, disease, or disorder.

[0720] In situ hybridization of chromosomal preparations and genetic mapping techniques, such as linkage analysis using established chromosomal markers, may be used for extending existing genetic maps. Often the placement of a gene on the chromosome of another mammalian species, such as mouse, may reveal associated markers even if the number or arm of the corresponding human chromosome is not known. These new marker sequences can be mapped to human chromosomes and may provide valuable information to investigators searching for disease genes using positional cloning or other gene discovery techniques. Once a disease or syndrome has been crudely correlated by genetic linkage with a particular genomic region, e.g., ataxia-telangiectasia to 11q22-23, any sequences mapping to that area may represent associated or regulatory genes for further investigation. (See, e.g., Gatti, R. A. et al. (1988) Nature 336:577-580.) The nucleotide sequences of the subject invention may also be used to detect differences in chromosomal architecture due to translocation, inversion, etc., among normal, carrier, or affected individuals.

[0721] Once a disease-associated gene is mapped to a chromosomal region, the gene must be cloned in order to identify mutations or other alterations (e.g., translocations or inversions) that may be correlated with disease. This process requires a physical map of the chromosomal region containing the disease-gene of interest along with associated markers. A physical map is necessary for determining the nucleotide sequence of and order of marker genes on a particular chromosomal region. Physical mapping techniques are well known in the art and require the generation of overlapping sets of cloned DNA fragments from a particular organelle, chromosome, or genome. These clones are analyzed to reconstruct and catalog their order. Once the position of a marker is determined, the DNA from that region is obtained by consulting the catalog and selecting clones from that region. The gene of interest is located through positional cloning techniques using hybridization or similar methods.

[0722] Diagnostic Uses

[0723] The dithp of the present invention may be used to design probes useful in diagnostic assays. Such assays, well known to those skilled in the art, may be used to detect or confirm conditions, disorders, or diseases associated with abnormal levels of dithp expression. Labeled probes developed from dithp sequences are added to a sample under hybridizing conditions of desired stringency. In some instances, dithp, or fragments or oligonucleotides derived from dithp, may be used as primers in amplification steps prior to hybridization. The amount of hybridization complex formed is quantified and compared with standards for that cell or tissue. If dithp expression varies significantly from the standard, the assay indicates the presence of the condition, disorder, or disease. Qualitative or quantitative diagnostic methods may include northern, dot blot, or other membrane or dip-stick based technologies or multiple-sample format technologies such as PCR, enzyme-linked immunosorbent assay (ELISA)-like, pin, or chip-based assays.

[0724] The probes described above may also be used to monitor the progress of conditions, disorders, or diseases associated with abnormal levels of dithp expression, or to evaluate the efficacy of a particular therapeutic treatment. The candidate probe may be identified from the dithp that are specific to a given human tissue and have not been observed in GenBank or other genome databases. Such a probe may be used in animal studies, preclinical tests, clinical trials, or in monitoring the treatment of an individual patient. In a typical process, standard expression is established by methods well known in the art for use as a basis of comparison, samples from patients affected by the disorder or disease are combined with the probe to evaluate any deviation from the standard profile, and a therapeutic agent is administered and effects are monitored to generate a treatment profile. Efficacy is evaluated by determining whether the expression progresses toward or returns to the standard normal pattern. Treatment profiles may be generated over a period of several days or several months. Statistical methods well known to those skilled in the art may be use to determine the significance of such therapeutic agents.

[0725] The polynucleotides are also useful for identifying individuals from minute biological samples, for example, by matching the RFLP pattern of a sample's DNA to that of an individual's DNA The polynucleotides of the present invention can also be used to determine the actual base-by-base DNA sequence of selected portions of an individual's genome. These sequences can be used to prepare PCR primers for amplifying and isolating such selected DNA, which can ten be sequenced. Using this technique, an individual can be identified through a unique set of DNA sequences. Once a unique ID database is established for an individual, positive identification of that individual can be made from extremely small tissue samples.

[0726] In a particular aspect, oligonucleotide primers derived from the dithp of the invention may be used to detect single nucleotide polymorphisms (SNPs). SNPs are substitutions, insertions and deletions that are a frequent cause of inherited or acquired genetic disease in humans. Methods of SNP detection include, but are not limited to, single-stranded conformation polymorphism (SSCP) and fluorescent SSCP (fSSCP) methods. In SSCP, oligonucleotide primers derived from dithp are used to amplify DNA using the polymerase chain reaction (PCR). The DNA may be derived, for example, from diseased or normal tissue, biopsy samples, bodily fluids, and the like. SNPs in the DNA cause differences in the secondary and tertiary structures of PCR products in single-stranded form, and these differences are detectable using gel electrophoresis in non-denaturing gels. In fSCCP, the oligonucleotide primers are fluorescently labeled, which allows detection of the amplimers in high-throughput equipment such as DNA sequencing machines. Additionally, sequence database analysis methods, termed in silico SNP (is SNP), are capable of identifying polymorphisms by comparing the sequences of individual overlapping DNA fragments which assemble into a common consensus sequence. These computer-based methods filter out sequence variations due to laboratory preparation of DNA and sequencing errors using statistical models and automated analyses of DNA sequence chromatograms. In the alternative, SNPs may be detected and characterized by mass spectrometry using, for example, the high throughput MASSARRAY system (Sequenom, Inc., San Diego Calif.).

[0727] DNA-based identification techniques are critical in forensic technology. DNA sequences taken from very small biological samples such as tissues, e.g., hair or skin, or body fluids, e.g., blood, saliva, semen, etc., can be amplified using, e.g., PCR, to identify individuals. (See, e.g., Erlich, H. (1992) PCR Technology, Freeman and Co., New York N.Y.). Similarly, polynucleotides of the present invention can be used as polymorphic markers.

[0728] There is also a need for reagents capable of identifying the source of a particular tissue. Appropriate reagents can comprise, for example, DNA probes or primers prepared from the sequences of the present invention that are specific for particular tissues. Panels of such reagents can identify tissue by species and/or by organ type. In a similar fashion, these reagents can be used to screen tissue cultures for contamination.

[0729] The polynucleotides of the present invention can also be used as molecular weight markers on nucleic acid gels or Southern blots, as diagnostic probes for the presence of a specific mRNA in a particular cell type, in the creation of subtracted cDNA libraries which aid in the discovery of novel polynucleotides, in selection and synthesis of oligomers for attachment to an array or other support, and as an antigen to elicit an immune response.

[0730] Disease Model Systems Using dithp

[0731] The dithp of the invention or their mammalian homologs may be “knocked out” in an animal model system using homologous recombination in embryonic stem (ES) cells. Such techniques are well known in the art and are useful for the generation of animal models of human disease. (See, e.g., U.S. Pat. Nos. 5,175,383 and 5,767,337.) For example, mouse ES cells, such as the mouse 129/SvJ cell line, are derived from the early mouse embryo and grown in culture. The ES cells are transformed with a vector containing the gene of interest disrupted by a marker gene, e.g., the neomycin phosphotransferase gene (neo; Capecchi, M. R. (1989) Science 244:1288-1292). The vector integrates into the corresponding region of the host genome by homologous recombination. Alternatively, homologous recombination takes place using the Cre-loxP system to knockout a gene of interest in a tissue- or developmental stage-specific manner (Marth, J. D. (1996) Clin Invest. 97:1999-2002; Wagner, K. U. et al. (1997) Nucleic Acids Res. 25:4323-4330). Transformed ES cells are identified and microinjected into mouse cell blastocysts such as those from the C57BL/6 mouse strain. The blastocysts are surgically transferred to pseudopregnant dams, and the resulting chimeric progeny are genotyped and bred to produce heterozygous or homozygous strains. Transgenic animals thus generated may be tested with potential therapeutic or toxic agents.

[0732] The dithp of the invention may also be manipulated in vitro in ES cells derived from human blastocysts. Human ES cells have the potential to differentiate into at least eight separate cell lineages including endoderm, mesoderm, and ectodermal cell types. These cell lineages differentiate into, for example, neural cells, hematopoietic lineages, and cardiomyocytes (Thomson, J. A. et al. (1998) Science 282:1145-1147).

[0733] The dithp of the invention can also be used to create “knockin” humanized animals (pigs) or transgenic animals (mice or rats) to model human disease. With knockin technology, a region of dithp is injected into animal ES cells, and the injected sequence integrates into the animal cell genome. Transformed cells are injected into blastulae, and the blastulae are implanted as described above. Transgenic progeny or inbred lines are studied and treated with potential pharmaceutical agents to obtain information on treatment of a human disease. Alternatively, a mammal inbred to overexpress dithp, resulting, e.g., in the secretion of DITHP in its milk, may also serve as a convenient source of that protein (Janne, J. et al. (1998) Biotechnol. Annu. Rev. 4:55-74).

[0734] Screening Assays

[0735] DITHP encoded by polynucleotides of the present invention may be used to screen for molecules that bind to or are bound by the encoded polypeptides. The binding of the polypeptide and the molecule may activate (agonist), increase, inhibit (antagonist), or decrease activity of the polypeptide or the bound molecule. Examples of such molecules include antibodies, oligonucleotides, proteins (e.g., receptors), or small molecules.

[0736] Preferably, the molecule is closely related to the natural ligand of the polypeptide, e.g., a ligand or fragment thereof, a natural substrate, or a structural or functional mimetic. (See, Coligan et al., (1991) Current Protocols in Immunology 1(2): Chapter 5.) Similarly, the molecule can be closely related to the natural receptor to which the polypeptide binds, or to at least a fragment of the receptor, e.g., the active site. In either case, the molecule can be rationally designed using known techniques.

[0737] Preferably, the screening for these molecules involves producing appropriate cells which express the polypeptide, either as a secreted protein or on the cell membrane. Preferred cells include cells from mammals, yeast, Drosophila, or E. coli. Cells expressing the polypeptide or cell membrane fractions which contain the expressed polypeptide are then contacted with a test compound and binding, stimulation, or inhibition of activity of either the polypeptide or the molecule is analyzed.

[0738] An assay may simply test binding of a candidate compound to the polypeptide, wherein binding is detected by a fluorophore, radioisotope, enzyme conjugate, or other detectable label. Alternatively, the assay may assess binding in the presence of a labeled competitor.

[0739] Additionally, the assay can be carried out using cell-free preparations, polypeptide/molecule affixed to a solid support, chemical libraries, or natural product mixtures. The assay may also simply comprise the steps of mixing a candidate compound with a solution containing a polypeptide, measuring polypeptide/molecule activity or binding, and comparing the polypeptide/molecule activity or binding to a standard.

[0740] Preferably, an ELISA assay using, e.g., a monoclonal or polyclonal antibody, can measure polypeptide level in a sample. The antibody can measure polypeptide level by either binding, directly or indirectly, to the polypeptide or by competing with the polypeptide for a substrate.

[0741] All of the above assays can be used in a diagnostic or prognostic context. The molecules discovered using these assays can be used to treat disease or to bring about a particular result in a patient (e.g., blood vessel growth) by activating or inhibiting the polypeptide/molecule. Moreover, the assays can discover agents which may inhibit or enhance the production of the polypeptide from suitably manipulated cells or tissues.

[0742] Transcript Imaging and Toxicological Testing

[0743] Another embodiment relates to the use of dithp to develop a transcript image of a tissue or cell type. A transcript image represents the global pattern of gene expression by a particular tissue or cell type. Global gene expression patterns are analyzed by quantifying the number of expressed genes and their relative abundance under given conditions and at a given time. (See Seilhamer et al., “Comparative Gene Transcript Analysis,” U.S. Pat. No. 5,840,484, expressly incorporated by reference herein.) Thus a transcript image may be generated by hybridizing the polynucleotides of the present invention or their complements to the totality of transcripts or reverse transcripts of a particular tissue or cell type. In one embodiment, the hybridization takes place in high-throughput format, wherein the polynucleotides of the present invention or their complements comprise a subset of a plurality of elements on a microarray. The resultant transcript image would provide a profile of gene activity pertaining to human molecules for diagnostics and therapeutics.

[0744] Transcript images which profile dithp expression may be generated using transcripts isolated from tissues, cell lines, biopsies, or other biological samples. The transcript image may thus reflect dithp expression in vivo, as in the case of a tissue or biopsy sample, or in vitro, as in the case of a cell line.

[0745] Transcript images which profile dithp expression may also be used in conjunction with in vitro model systems and preclinical evaluation of pharmaceuticals, as well as toxicological testing of industrial and naturally-occurring environmental compounds. All compounds induce characteristic gene expression patterns, frequently termed molecular fingerprints or toxicant signatures, which are indicative of mechanisms of action and toxicity (Nuwaysir, E. F. et al. (1999) Mol. Carcinog. 24:153-159; Steiner, S. and Anderson, N. L. (2000) Toxicol. Lett. 112-113:467-71, expressly incorporated by reference herein). If a test compound has a signature similar to that of a compound with known toxicity, it is likely to share those toxic properties. These fingerprints or signatures are most useful and refined when they contain expression information from a large number of genes and gene families. Ideally, a genome-wide measurement of expression provides the highest quality signature. Even genes whose expression is not altered by any tested compounds are important as well, as the levels of expression of these genes are used to normalized the rest of the expression data. The normalization procedure is useful for comparison of expression data after treatment with different compounds. While the assignment of gene function to elements of a toxicant signature aids in interpretation of toxicity mechanisms, knowledge of gene function is not necessary for the statistical matching of signatures which leads to prediction of toxicity. (See, for example, Press Release 00-02 from the National Institute of Environmental Health Sciences, released Feb. 29, 2000, available at http:/www.niehs.nih.gov/oc./news/toxchip.htm). Therefore, it is important and desirable in toxicological screening using toxicant signatures to include all expressed gene sequences.

[0746] In one embodiment, the toxicity of a test compound is assessed by treating a biological sample containing nucleic acids with the test compound. Nucleic acids that are expressed in the treated biological sample are hybridized with one or more probes specific to the polynucleotides of the present invention, so that transcript levels corresponding to the polynucleotides of the present invention may be quantified. The transcript levels in the treated biological sample are compared with levels in an untreated biological sample. Differences in the transcript levels between the two samples are indicative of a toxic response caused by the test compound in the treated sample.

[0747] Another particular embodiment relates to the use of DITHP encoded by polynucleotides of the present invention to analyze the proteome of a tissue or cell type. The term proteome refers to the global pattern of protein expression in a particular tissue or cell type. Each protein component of a proteome can be subjected individually to further analysis. Proteome expression patterns, or profiles, are analyzed by quantifying the number of expressed proteins and their relative abundance under given conditions and at a given time. A profile of a cell's proteome may thus be generated by separating and analyzing the polypeptides of a particular tissue or cell type. In one embodiment, the separation is achieved using two-dimensional gel electrophoresis, in which proteins from a sample are separated by isoelectric focusing in the first dimension, and then according to molecular weight by sodium dodecyl sulfate slab gel electrophoresis in the second dimension (Steiner and Anderson, supra). The proteins are visualized in the gel as discrete and uniquely positioned spots, typically by staining the gel with an agent such as Coomassie Blue or silver or fluorescent stains. The optical density of each protein spot is generally proportional to the level of the protein in the sample. The optical densities of equivalently positioned protein spots from different samples, for example, from biological samples either treated or untreated with a test compound or therapeutic agent, are compared to identify any changes in protein spot density related to the treatment. The proteins in the spots are partially sequenced using, for example, standard methods employing chemical or enzymatic cleavage followed by mass spectrometry. The identity of the protein in a spot may be determined by comparing its partial sequence, preferably of at least 5 contiguous amino acid residues, to the polypeptide sequences of the present invention. In some cases, further sequence data may be obtained for definitive protein identification.

[0748] A proteomic profile may also be generated using antibodies specific for DITHP to quantify the levels of DITHP expression. In one embodiment, the antibodies are used as elements on a microarray, and protein expression levels are quantified by exposing the microarray to the sample and detecting the levels of protein bound to each array element (Lueking, A. et al. (1999) Anal. Biochem. 270:103-11; Mendoze, L. G. et al. (1999) Biotechniques 27:778-88). Detection may be performed by a variety of methods known in the art, for example, by reacting the proteins in the sample with a thiol- or amino-reactive fluorescent compound and detecting the amount of fluorescence bound at each array element.

[0749] Toxicant signatures at the proteome level are also useful for toxicological screening, and should be analyzed in parallel with toxicant signatures at the transcript level. There is a poor correlation between transcript and protein abundances for some proteins in some tissues (Anderson, N. L. and Seilhamer, J. (1997) Electrophoresis 18:533-537), so proteome toxicant signatures may be useful in the analysis of compounds which do not significantly affect the transcript image, but which alter the proteomic profile. In addition, the analysis of transcripts in body fluids is difficult, due to rapid degradation of mRNA, so proteomic profiling may be more reliable and informative in such cases.

[0750] In another embodiment, the toxicity of a test compound is assessed by treating a biological sample containing proteins with the test compound. Proteins that are expressed in the treated biological sample are separated so that the amount of each protein can be quantified. The amount of each protein is compared to the amount of the corresponding protein in an untreated biological sample. A difference in the amount of protein between the two samples is indicative of a toxic response to the test compound in the treated sample. Individual proteins are identified by sequencing the amino acid residues of the individual proteins and comparing these partial sequences to the DITHP encoded by polynucleotides of the present invention.

[0751] In another embodiment, the toxicity of a test compound is assessed by treating a biological sample containing proteins with the test compound. Proteins from the biological sample are incubated with antibodies specific to the DITHP encoded by polynucleotides of the present invention. The amount of protein recognized by the antibodies is quantified. The amount of protein in the treated biological sample is compared with the amount in an untreated biological sample. A difference in the amount of protein between the two samples is indicative of a toxic response to the test compound in the treated sample.

[0752] Transcript images may be used to profile dithp expression in distinct tissue types. This process can be used to determine human molecule activity in a particular tissue type relative to this activity in a different tissue type. Transcript images may be used to generate a profile of dithp expression characteristic of diseased tissue. Transcript images of tissues before and after treatment may be used for diagnostic purposes, to monitor the progression of disease, and to monitor the efficacy of drug treatments for diseases which affect the activity of human molecules.

[0753] Transcript images of cell lines can be used to assess human molecule activity and/or to identity cell lines that lack or misregulate this activity. Such cell lines may then be treated with pharmaceutical agents, and a transcript image following treatment may indicate the efficacy of these agents in restoring desired levels of this activity. A similar approach may be used to assess the toxicity of pharmaceutical agents as reflected by undesirable changes in human molecule activity. Candidate pharmaceutical agents may be evaluated by comparing their associated transcript images with those of pharmaceutical agents of known effectiveness.

[0754] Antisense Molecules

[0755] The polynucleotides of the present invention are useful in antisense technology. Antisense technology or therapy relies on the modulation of expression of a target protein through the specific binding of an antisense sequence to a target sequence encoding the target protein or directing its expression. (See, e.g., Agrawal, S., ed. (1996) Antisense Therapeutics, Humana Press Inc., Totawa N.J.; Alama, A. et al. (1997) Pharmacol. Res. 36(3):171-178; Crooke, S. T. (1997) Adv. Pharmacol. 40:149; Sharma, H. W. and R. Narayanan (1995) Bioessays 17(12):1055-1063; and Lavrosky, Y. et al. (1997) Biochem. Mol. Med. 62(1):11-22.) An antisense sequence is a polynucleotide sequence capable of specifically hybridizing to at least a portion of the target sequence. Antisense sequences bind to cellular mRNA and/or genomic DNA, affecting translation and/or transcription. Antisense sequences can be DNA, RNA, or nucleic acid mimics and analogs. (See, e.g., Rossi, J. J. et al (1991) Antisense Res. Dev. 1(3):285-288; Lee, R. et al. (1998) Biochemistry 37(3):900-1010; Pardridge, W. M. et al. (1995) Proc. Natl. Acad. Sci. USA 92(12):5592-5596; and Nielsen, P. E. and Haaima, G. (1997) Chem Soc. Rev. 96:73-78.) Typically, the binding which results in modulation of expression occurs through hybridization or binding of complementary base pairs. Antisense sequences can also bind to DNA duplexes through specific interactions in the major groove of the double helix.

[0756] The polynucleotides of the present invention and fragments thereof can be used as antisense sequences to modify the expression of the polypeptide encoded by dithp. The antisense sequences can be produced ex vivo, such as by using any of the ABI nucleic acid synthesizer series (Applied Biosystems) or other automated systems known in the art. Antisense sequences can also be produced biologically, such as by transforming an appropriate host cell with an expression vector containing the sequence of interest. (See, e.g., Agrawal, supra.)

[0757] In therapeutic use, any gene delivery system suitable for introduction of the antisense sequences into appropriate target cells can be used. Antisense sequences can be delivered intracellularly in the form of an expression plasmid which, upon transcription, produces a sequence complementary to at least a portion of the cellular sequence encoding the target protein. (See, e.g., Slater, J. E., et al. (1998) J. Allergy Clin. Immunol. 102(3):469-475; and Scanlon, K. J., et al. (1995) 9(13):1288-1296.) Antisense sequences can also be introduced intracellularly through the use of viral vectors, such as retrovirus and adeno-associated virus vectors. (See, e.g., Miller, A. D. (1990) Blood 76:271; Ausubel F. M. et al. (1995) Current Protocols in Molecular Biology, John Wiley & Sons, New York N.Y.; Uckert, W. and W. Walther (1994) Pharmacol. Ther. 63(3):323-347.) Other gene delivery mechanisms include liposome-derived systems, artificial viral envelopes, and other systems known in the art. (See, e.g., Rossi, J. J. (1995) Br. Med. Bull. 51(1):217-225; Boado, R. J. et al. (1998) J. Pharm. Sci 87(11):1308-1315; and Morris, M. C. et al. (1997) Nucleic Acids Res. 25(14):2730-2736.)

[0758] Expression

[0759] In order to express a biologically active DITHP, the nucleotide sequences encoding DITHP or fragments thereof may be inserted into an appropriate expression vector, i.e., a vector which contains the necessary elements for transcriptional and translational control of the inserted coding sequence in a suitable host. Methods which are well known to those skilled in the art may be used to construct expression vectors containing sequences encoding DITHP and appropriate transcriptional and translational control elements. These methods include in vitro recombinant DNA techniques, synthetic techniques, and in vivo genetic recombination. (See, e.g., Sambrook, supra, Chapters 4, 8, 16, and 17; and Ausubel, supra, Chapters 9, 10, 13, and 16.)

[0760] A variety of expression vector/host systems may be utilized to contain and express sequences encoding DITHP. These include, but are not limited to, microorganisms such as bacteria transformed with recombinant bacteriophage, plasmid, or cosmid DNA expression vectors; yeast transformed with yeast expression vectors; insect cell systems infected with viral expression vectors (e.g., baculovirus); plant cell systems transformed with viral expression vectors (e.g., cauliflower mosaic virus, CaMV, or tobacco mosaic virus, TMV) or with bacterial expression vectors (e.g., Ti or pBR322 plasmids); or animal (mammalian) cell systems. (See, e.g., Sambrook, supra; Ausubel, 1995, supra, Van Heeke, G. and S. M. Schuster (1989) J. Biol. Chem 264:5503-5509; Bitter, G. A. et al. (1987) Methods Enzymol. 153:516-544; Scorer, C. A et al. (1994) Bio/Technology 12:181-184; Engelhard, E. K. et al. (1994) Proc. Natl. Acad. Sci. USA 91:3224-3227; Sandig, V. et al. (1996) Hume Gene Ther. 7:1937-1945; Takamatsu, N. (1987) EMBO J. 6:307-311; Coruzzi, G. et al. (1984) EMBO J. 3:1671-1680; Broglie, R. et al. (1984) Science 224:838-843; Winter, J. et al. (1991) Results Probl. Cell Differ. 17:85-105; The McGraw Hill Yearbook of Science and Technology (1992) McGraw Hill, New York N.Y., pp. 191-196; Logan, J. and T. Shenk (1984) Proc. Natl. Acad. Sci. USA 81:3655-3659; and Harrington, J. J. et al. (1997) Nat. Genet. 15:345-355.) Expression vectors derived from retroviruses, adenoviruses, or herpes or vaccinia viruses, or from various bacterial plasmids, may be used for delivery of nucleotide sequences to the targeted organ, tissue, or cell population. (See, e.g., Di Nicola, M. et al. (1998) Cancer Gen. Ther. 5(6):350-356; Yu, M. et al., (1993) Proc. Nail. Acad. Sci. USA 90(13):6340-6344; Buller, R. M. et al. (1985) Nature 317(6040):813-815; McGregor, D. P. et al. (1994) Mol. Immunol. 31(3):219-226; and Verma, I. M. and N. Somia (1997) Nature 389:239-242.) The invention is not limited by the host cell employed.

[0761] For long term production of recombinant proteins in mammalian systems, stable expression of DITHP in cell lines is preferred. For example, sequences encoding DITHP can be transformed into cell lines using expression vectors which may contain viral origins of replication and/or endogenous expression elements and a selectable marker gene on the same or on a separate vector. Any number of selection systems may be used to recover transformed cell lines. (See, e.g., Wigler, M. et al. (1977) Cell 11:223-232; Lowy, I. et al. (1980) Cell 22:817-823.; Wigler, M. et al. (1980) Proc. Natl. Acad. Sci. USA 77:3567-3570; Colbere-Garapin, F. et al. (1981) J. Mol. Biol. 150:1-14; Hartman, S. C. and R. C. Mulligan (1988) Proc. Natl. Acad. Sci. USA 85:8047-8051; Rhodes, C. A. (1995) Methods Mol. Biol. 55:121-131.)

[0762] Therapeutic Uses of dithp

[0763] The dithp of the invention may be used for somatic or germline gene therapy. Gene therapy may be performed to (i) correct a genetic deficiency (e.g., in the cases of severe combined immunodeficiency (SCID)-X1 disease characterized by X-linked inheritance (Cavazzana-Calvo, M. et al. (2000) Science 288:669-672), severe combined immunodeficiency syndrome associated with an inherited adenosine deaminase (ADA) deficiency (Blaese, R. M. et al. (1995) Science 270:475-480; Bordignon, C. et al. (1995) Science 270:470-475), cystic fibrosis (Zabner, J. et al. (1993) Cell 75:207-216; Crystal, R. G. et al. (1995) Hun Gene Therapy 6:643-666; Crystal, R. G. et al. (1995) Hum. Gene Therapy 6:667-703), thalassemias, familial hypercholesterolemia, and hemophilia resulting from Factor VIII or Factor IX deficiencies (Crystal, R. G. (1995) Science 270:404-410; Verma, I. M. and Somia, N. (1997) Nature 389:239-242)), (ii) express a conditionally lethal gene product (e.g., in the case of cancers which result from unregulated cell proliferation), or (iii) express a protein which affords protection against intracellular parasites (e.g., against human retroviruses, such as human immunodeficiency virus (IV) (Baltimore, D. (1988) Nature 335:395-396; Poeschla, E. et al. (1996) Proc. Natl. Acad. Sci. USA. 93:11395-11399), hepatitis B or C virus (HBV, HCV); fungal parasites, such as Candida albicans and Paracoccidioides brasiliensis; and protozoan parasites such as Plasmodium falciparum and Trypanosoma cruzi). In the case where a genetic deficiency in dithp expression or regulation causes disease, the expression of dithp from an appropriate population of transduced cells may alleviate the clinical manifestations caused by the genetic deficiency.

[0764] In a further embodiment of the invention, diseases or disorders caused by deficiencies in dithp are treated by constructing mammalian expression vectors comprising dithp and introducing these vectors by mechanical means into dithp deficient cells. Mechanical transfer technologies for use with cells in vivo or ex vitro include (i) direct DNA microinjection into individual cells, (ii) ballistic gold particle delivery, (iii) liposome-mediated transfection, (iv) receptor-mediated gene transfer, and (v) the use of DNA transposons (Morgan, R. A. and Anderson, W. F. (1993) Annu. Rev. Biochem 62:191-217; Ivics, Z. (1997) Cell 91:501-510; Boulay, J. -L. and Recipon, H. (1998) Curr. Opin. Biotechnol. 9:445-450).

[0765] Expression vectors that may be effective for the expression of dithp include, but are not limited to, the PCDNA 3.1, EPITAG, PRCCMV2, PREP, PVAX vectors (Invitrogen, Carlsbad Calif.), PCMV-SCRIPT, PCMV-TAG, PEGSH/PERV (Stratagene, La Jolla Calif.), and PTET-OFF, PTET-ON, PTRE2, PTRE2-LUC, PTK-HYG (Clontech, Palo Alto Calif.). The dithp of the invention may be expressed using (i) a constitutively active promoter, (e.g., from cytomegalovirus (CMV), Rous sarcoma virus (RSV), SV40 virus, thymidine kinase (TK), or β-actin genes), (ii) an inducible promoter (e.g., the tetracycline-regulated promoter (Gossen, M. and Bujard, H. (1992) Proc. Natl. Acad. Sci. U.S.A. 89:5547-5551; Gossen, M. et al., (1995) Science 268:1766-1769; Rossi, F. M. V. and Blau, H. N. (1998) Curr. Opin. Biotechnol. 9:451-456), commercially available in the T-REX plasmid (Invitrogen); the ecdysone-inducible promoter (available in the plasmids PVGRXR and PIND; Invitrogen); the FK506/rapamycin inducible promoter; or the RU486/mifepristone inducible promoter (Rossi, F. M. V. and Blau, H. M. supra), or (iii) a tissue-specific promoter or the native promoter of the endogenous gene encoding DITHP from a normal individual.

[0766] Commercially available liposome transformation kits (e.g., the PERFECT LIPID TRANSFECTION KIT, available from Invitrogen) allow one with ordinary skill in the art to deliver polynucleotides to target cells in culture and require minimal effort to optimize experimental parameters. In the alternative, transformation is performed using the calcium phosphate method (Graham, F. L. and Eb, A. J. (1973) Virology 52:456-467), or by electroporation (Neumann, E. et al. (1982) EMBO J. 1:841-845). The introduction of DNA to primary cells requires modification of these standardized mammalian transfection protocols.

[0767] In another embodiment of the invention, diseases or disorders caused by genetic defects with respect to dithp expression are treated by constructing a retrovirus vector consisting of (i) dithp under the control of an independent promoter or the retrovirus long terminal repeat (LTR) promoter, (ii) appropriate RNA packaging signals, and (ii) a Rev-responsive element (RRE) along with additional retrovirus cis-acting RNA sequences and coding sequences required for efficient vector propagation. Retrovirus vectors (e.g., PFB and PFBNEO) are commercially available (Stratagene) and are based on published data (Riviere, I. et al. (1995) Proc. Natl. Acad. Sci. U.S.A. 92:6733-6737), incorporated by reference herein. The vector is propagated in an appropriate vector producing cell line (VPCL) that expresses an envelope gene with a tropism for receptors on the target cells or a promiscuous envelope protein such as VSVg (Armentano, D. et al. (1987) J. Virol. 61:1647-1650; Bender, M. A. et al. (1987) J. Virol. 61:1639-1646; Adam, M. A. and Miller, A. D. (1988) J. Virol. 62:3802-3806; Dull, T. et al. (1998) J. Virol. 72:8463-8471; Zufferey, R. et al. (1998) J. Virol. 72:9873-9880). U.S. Pat. No. 5,910,434 to Rigg (“Method for obtaining retrovirus packaging cell lines producing high transducing efficiency retroviral supernatant”) discloses a method for obtaining retrovirus packaging cell lines and is hereby incorporated by reference. Propagation of retrovirus vectors, transduction of a population of cells (e.g., CD4⁺ T-cells), and the return of transduced cells to a patient are procedures well known to persons skilled in the art of gene therapy and have been well documented (Ranga, U. et al. (1997) J. Virol. 71:7020-7029; Bauer, G. et al. (1997) Blood 89:2259-2267; Bonyhadi, M. L. (1997) J. Virol. 71:4707-4716; Ranga, U. et ,al. (1998) Proc. Natl. Acad. Sci. U.S.A. 95:1201-1206; Su, L. (1997) Blood 89:2283-2290).

[0768] In the alternative, an adenovirus-based gene therapy delivery system is used to deliver dithp to cells which have one or more genetic abnormalities with respect to the expression of dithp. The construction and packaging of adenovirus-based vectors are well known to those with ordinary skill in the art. Replication defective adenovirus vectors have proven to be versatile for importing genes encoding immunoregulatory proteins into intact islets in the pancreas (Csete, M. E. et al. (1995) Transplantation 27:263-268). Potentially useful adenoviral vectors are described in U.S. Pat. No. 5,707,618 to Armentano (“Adenovirus vectors for gene therapy”), hereby incorporated by reference. For adenoviral vectors, see also Antinozzi, P. A. et al. (1999) Annu. Rev. Nutr. 19:511-544 and Verma, I. M. and Somia, N. (1997) Nature 18:389:239-242, both incorporated by reference herein.

[0769] In another alternative, a herpes-based, gene therapy delivery system is used to deliver dithp to target cells which have one or more genetic abnormalities with respect to the expression of dithp. The use of herpes simplex virus (HSV)-based vectors may be especially valuable for introducing dithp to cells of the central nervous system, for which HSV has a tropism. The construction and packaging of herpes-based vectors are well known to those with ordinary skill in the art. A replication-competent herpes simplex virus (HSV) type 1-based vector has been used to deliver a reporter gene to the eyes of primates (Liu, X. et al. (1999) Exp. Eye Res.169:385-395). The construction of a HSV-1 virus vector has also been disclosed in detail in U.S. Pat. No. 5,804,413 to DeLuca (“Herpes simplex virus strains for gene transfer”), which is hereby incorporated by reference. U.S. Pat. No. 5,804,413 teaches the use of recombinant HSV d92 which consists of a genome containing at least one exogenous gene to be transferred to a cell under the control of the appropriate promoter for purposes including human gene therapy. Also taught by this patent are the construction and use of recombinant HSV strains deleted for ICP4, ICP27 and ICP22. For HSV vectors, see also Goins, W. F. et al. 1999 J. Virol. 73:519-532 and Xu, H. et al., (1994) Dev. Biol. 163:152-161, hereby incorporated by reference. The manipulation of cloned herpesvirus sequences, the generation of recombinant virus following the transfection of multiple plasmids containing different segments of the large herpesvirus genomes, the growth and propagation of herpesvirus, and the infection of cells with herpesvirus are techniques well known to those of ordinary skill in the art.

[0770] In another alternative, an alphavirus (positive, single-stranded RNA virus) vector is used to deliver dithp to target cells. The biology of the prototypic alphavirus, Semliki Forest Virus (SFV), has been studied extensively and gene transfer vectors have been based on the SFV genome (Garoff, H. and Li, K. -J. (1998) Curr. Opin. Biotech. 9:464-469). During alphavirus RNA replication, a subgenomic RNA is generated that normally encodes the viral capsid proteins. This subgenomic RNA replicates to higher levels than the full-length genomic RNA, resulting in the overproduction of capsid proteins relative to the viral proteins with enzymatic activity (e.g., protease and polymerase). Similarly, inserting dithp into the alphavirus genome in place of the capsid-coding region results in the production of a large number of dithp RNAs and the synthesis of high levels of DITHP in vector transduced cells. While alphavirus infection is typically associated with cell lysis within a few days, the ability to establish a persistent infection in hamster normal kidney cells (BHK-21) with a variant of Sindbis virus (SIN) indicates that the lytic replication of alphaviruses can be altered to suit the needs of the gene therapy application (Dryga, S. A. et al. (1997) Virology 228:7483). The wide host range of alphaviruses will allow the introduction of dithp into a variety of cell types. The specific transduction of a subset of cells in a population may require the sorting of cells prior to transduction. The methods of manipulating infectious cDNA clones of alphaviruses, performing alphavirus cDNA and RNA transfections, and performing alphavirus infections, are well known to those with ordinary skin in the art.

[0771] Antibodies

[0772] Anti-DITHP antibodies may be used to analyze protein expression levels. Such antibodies include, but are not limited to, polyclonal, monoclonal, chimeric, single chain, and Fab fragments. For descriptions of and protocols of antibody technologies, see, e.g., Pound J. D. (1998) Immunochemical Protocols, Humana Press, Totowa, N.J.

[0773] The amino acid sequence encoded by the dithp of the Sequence Listing may be analyzed by appropriate software (e.g., LASERGENE NAVIGATOR software, DNASTAR) to determine regions of high immunogenicity. The optimal sequences for immunization are selected from the C-terminus, the N-terminus, and those intervening, hydrophilic regions of the polypeptide which are likely to be exposed to the external environment when the polypeptide is in its natural conformation. Analysis used to select appropriate epitopes is also described by Ausubel (1997, supra, Chapter 11.7). Peptides used for antibody induction do not need to have biological activity; however, they must be antigenic. Peptides used to induce specific antibodies may have an amino acid sequence consisting of at least five amino acids, preferably at least 10 amino acids, and most preferably at least 15 amino acids. A peptide which mimics an antigenic fragment of the natural polypeptide may be fused with another protein such as keyhole limpet hemocyanin (KLH; Sigma, St. Louis Mo.) for antibody production. A peptide encompassing an antigenic region may be expressed from a dithp, synthesized as described above, or purified from human cells.

[0774] Procedures well known in the art may be used for the production of antibodies. Various hosts including mice, goats, and rabbits, may be immunized by injection with a peptide. Depending on the host species, various adjuvants may be used to increase immunological response.

[0775] In one procedure, peptides about 15 residues in length may be synthesized using an ABI 431A peptide synthesizer (Applied Biosystems) using fmoc-chemistry and coupled to KLH (Sigma) by reaction with M-maleimidobenzoyl-N-hydroxysuccinimide ester (Ausubel, 1995, supra). Rabbits are immunized with the peptide-KLH complex in complete Freund's adjuvant. The resulting antisera are tested for antipeptide activity by binding the peptide to plastic, blocking with 1% bovine serum albumin (BSA), reacting with rabbit antisera, washing, and reacting with radioiodinated goat anti-rabbit IgG. Antisera with antipeptide activity are tested for anti-DITHP activity using protocols well known in the art, including ELISA, radioimmunoassay (RIA), and immunoblotting.

[0776] In another procedure, isolated and purified peptide may be used to immunize mice (about 100 μg of peptide) or rabbits (about 1 mg of peptide). Subsequently, the peptide is radioiodinated and used to screen the immunized animals' B-lymphocytes for production of antipeptide antibodies. Positive cells are then used to produce hybridomas using standard techniques. About 20 mg of peptide is sufficient for labeling and screening several thousand clones. Hybridomas of interest are detected by screening with radioiodinated peptide to identify those fusions producing peptide-specific monoclonal antibody. In a typical protocol, wells of a multi-well plate (FAST, Becton-Dickinson, Palo Alto, Calif.) are coated with affinty-purified, specific rabbit-anti-mouse (or suitable anti-species IgG) antibodies at 10 mg/ml. The coated wells are blocked with 1% BSA and washed and exposed to supernatants from hybridomas. After incubation, the wells are exposed to radiolabeled peptide at 1 mg/ml.

[0777] Clones producing antibodies bind a quantity of labeled peptide that is detectable above background. Such clones are expanded and subjected to 2 cycles of cloning. Cloned hybridomas are injected into pristane-treated mice to produce ascites, and monoclonal antibody is purified from the ascitic fluid by affinity chromatography on protein A (Amersham Pharmacia Biotech). Several procedures for the production of monoclonal antibodies, including in vitro production, are described in Pound (supra). Monoclonal antibodies with antipeptide activity are tested for anti-DITHP activity using protocols well known in the art, including ELISA, RIA, and immunoblotting.

[0778] Antibody fragments containing specific binding sites for an epitope may also be generated. For example, such fragments include, but are not limited to, the F(ab′)₂ fragments produced by pepsin digestion of the antibody molecule, and the Fab fragments generated by reducing the disulfide bridges of the F(ab′)₂ fragments. Alternatively, construction of Fab expression libraries in filamentous bacteriophage allows rapid and easy identification of monoclonal fragments with desired specificity (Pound, supra, Chaps. 45-47). Antibodies generated against polypeptide encoded by dithp can be used to purify and characterize full-length DITHP protein and its activity, binding partners, etc.

[0779] Assays Using Antibodies

[0780] Anti-DITHP antibodies may be used in assays to quantify the amount of DRIP found in a particular human cell. Such assays include methods utilizing the antibody and a label to detect expression level under normal or disease conditions. The peptides and antibodies of the invention may be used with or without modification or labeled by joining them, either covalently or noncovalently, with a reporter molecule.

[0781] Protocols for detecting and measuring protein expression using either polyclonal or monoclonal antibodies are well known in the art. Examples include ELISA, RIA, and fluorescent activated cell sorting (FACS). Such immunoassays typically involve the formation of complexes between the DITHP and its specific antibody and the measurement of such complexes. These and other assays are described in Pound (supra).

[0782] Without ft elaboration, it is believed that one skilled in the art can, using the preceding description, utilize the present invention to its fullest extent. The following preferred specific embodiments are, therefore, to be construed as merely illustrative, and not limitative of the remainder of the disclosure in any way whatsoever.

[0783] The disclosures of all patents, applications, and publications mentioned above and below, including U.S. Ser. No. 60/184,777, U.S. Ser. No. 60/184,797, U.S. Ser. No. 60/184,698, U.S. Ser. No. 60/184,770, U.S. Ser. No. 60/184,774, U.S. Ser. No. 60/184,693, U.S. Ser. No. 60/184,771,U.S. Ser. No. 60/184,813, U.S. Ser. No. 60/184,773, U.S. Ser. No. 60/184,776, U.S. Ser. No. 60/184,769, U.S. Ser. No. 60/184,768, U.S. Ser. No. 60/184,837, U.S. Ser. No. 60/184,697, U.S. Ser. No. 60/184,841, U.S. Ser. No. 60/184,772, U.S. Ser. No. 60/185,213, U.S. Ser. No. 60/185,216, U.S. Ser. No. 60/204,863, U.S. Ser. No. 60/205,221, U.S. Ser. No. 60/204,815, U.S. Ser. No. 60/203,785, U.S. Ser. No. 60/204,821, U.S. Ser. No. 60/204,908, U.S. Ser. No. 60/204,226, U.S. Ser. No. 60/204,525, U.S. Ser. No. 60/205,285, U.S. Ser. No. 60/205,232, U.S. Ser. No. 60/205,323, U.S. Ser. No. 60/205,287, U.S. Ser. No. 60/205,324, and U.S. Ser. No. 60/205,286, are hereby expressly incorporated by reference.

### EXAMPLES

[0784] I. Construction of cDNA Libraries

[0785] RNA was purchased from CLONTECH Laboratories, Inc. Palo Alto Calif.) or isolated from various tissues. Some tissues were homogenized and lysed in guanidinium isothiocyanate, while others were homogenized and lysed in phenol or in a suitable mixture of denaturants, such as TRIZOL (Life Technologies), a monophasic solution of phenol and guanidine isothiocyanate. The resulting lysates were centrifuged over CsCl cushions or extracted with chloroform. RNA was precipitated with either isopropanol or sodium acetate and ethanol, or by other routine methods.

[0786] Phenol extraction and precipitation of RNA were repeated as necessary to increase RNA purity. In most cases, RNA was treated with DNase. For most libraries, poly(A+) RNA was isolated using oligo dm-coupled paramagnetic particles (Promega Corporation (Promega), Madison Wis.), OLIGOTEX latex particles (QIAGEN, Inc. (QIAGEN), Valencia Calif.), or an OLIGOTEX mRNA purification kit (QIAGEN). Alternatively, RNA was isolated directly from tissue lysates using other RNA isolation kits, e.g., the POLY(A)PURE mRNA purification kit (Ambion, Inc., Austin IX).

[0787] In some cases, Stratagene was provided with RNA and constructed the corresponding cDNA libraries. Otherwise, cDNA was synthesized and cDNA libraries were constructed with the UNIZAP vector system (Stratagene Cloning Systems, Inc. (Stratagene), La Jolla Calif.) or SUPERSCRIPT plasmid system (Life Technologies), using the recommended procedures or similar methods known in the art. (See, e.g., Ausubel, 1997, supra, Chapters 5.1 through 6.6.) Reverse transcription was initiated using oligo d(T) or random primers. Synthetic oligonucleotide adapters were ligated to double stranded cDNA, and the cDNA was digested with the appropriate restriction enzyme or enzymes. For most libraries, the cDNA was size-selected (300-1000 bp) using SEPHAROSE S1000, SEPHAROSE CL2B, or SEPHAROSE C14B column chromatography (Amersham Pharmacia Biotech) or preparative agarose gel electrophoresis. cDNAs were ligated into compatible restriction enzyme sites of the polylinker of a suitable plasmid, e.g., PBLUESCRIPT plasmid (Stratagene), PSPORT1 plasmid (Life Technologies), PCDNA2.1 plasmid nitrogen, Carlsbad Calif.), PBK-CMV plasmid (Stratagene), or pINCY (Incyte Genomics, Palo Alto Calif.), or derivatives thereof. Recombinant plasmids were transformed into competent E. coli cells including XL1-Blue, XL1-BlueMRF, or SOLR from Stratagene or DH5α, DH10B, or ElectroMAX DH10B from Life Technologies.

[0788] II. Isolation of cDNA Clones

[0789] Plasmids were recovered from host cells by in vivo excision using the UNIZAP vector system (Stratagene) or by cell lysis. Plasmids were purified using at least one of the following: the Magic or WIZARD Minipreps DNA purification system (Promega); the AGTC Miniprep purification kit (Edge BioSystems, Gaithersburg Md.); and the QIAWELL 8, QIAWELL 8 Plus, and QIAWELL 8 Ultra plasmid purification systems or the R.E.A.L. PREP 96 plasmid purification kit (QIAGEN). Following precipitation, plasmids were resuspended in 0.1 ml of distilled water and stored, with or without lyophilization, at 4° C.

[0790] Alternatively, plasmid DNA was amplified from host cell lysates using direct link PCR in a high-throughput format. (Rao, V. B. (1994) Anal. Biochem. 216:1-14.) Host cell lysis and thermal cycling steps were carried out in a single reaction mixture. Samples were processed and stored in 384 well plates, and the concentration of amplified plasmid DNA was quantified fluorometrically using PICOGREEN dye (Molecular Probes, Inc. (Molecular Probes), Eugene Oreg.) and a FLUOROSKAN II fluorescence scanner (Labsystems Oy, Helsinki, Finland).

[0791] III. Sequencing and Analysis

[0792] cDNA sequencing reactions were processed using standard methods or high-throughput instrumentation such as the ABI CATALYST 800 thermal cycler (Applied Biosystems) or the PTC-200 thermal cycler (MJ Research) in conjunction with the HYDRA microdispenser (Robbins Scientific Corp., Sunnyvale Calif.) or the MICROLAB 2200 liquid transfer system (Hamilton). cDNA sequencing reactions were prepared using reagents provided by Amersham Pharmacia Biotech or supplied in ABI sequencing kits such as the ABI PRISM BIGDYE Terminator cycle sequencing ready reaction kit (Applied Biosystems). Electrophoretic separation of cDNA sequencing reactions and detection of labeled polynucleotides were carried out using the MEGABACE 1000 DNA sequencing system (Molecular Dynamics); the ABI PRISM 373 or 377 sequencing system (Applied Biosystems) in conjunction with standard ABI protocols and base calling software; or other sequence analysis systems known in the art Reading frames within the cDNA sequences were identified using standard methods (reviewed in Ausubel, 1997, supra, Chapter 7.7). Some of the cDNA sequences were selected for extension using the techniques disclosed in Example VIII.

[0793] IV. Assembly and Analysis of Sequences

[0794] Component sequences from chromatograms were subject to PHRED analysis and assigned a quality score. The sequences having at least a required quality score were subject to various pre-processing editing pathways to eliminate, e.g., low quality 3′ ends, vector and linker sequences, polyA tails, Alu repeats, mitochondrial and ribosomal sequences, bacterial contamination sequences, and sequences smaller than 50 base pairs. In particular, low-information sequences and repetitive elements (e.g., dinucleotide repeats, Alu repeats, etc.) were replaced by “n's”, or masked, to prevent spurious matches.

[0795] Processed sequences were then subject to assembly procures in which the sequences were assigned to gene bins (ins). Each sequence could only belong to one bin. Sequences in each gene bin were assembled to produce consensus sequences (templates). Subsequent new sequences were added to existing bins using BLASTn (v. 1.4 WashU) and CROSSMATCH. Candidate pairs were identified as all BLAST hits having a quality score greater than or equal to 150. Alignments of at least 82% local identity were accepted into the bin. The component sequences from each bin were assembled using a version of PHRAP. Bins with several overlapping component sequences were assembled using DEEP PHRAP. The orientation (sense or antisense) of each assembled template was determined based on the number and orientation of its component sequences. Template sequences as disclosed in the sequence listing correspond to sense strand sequences (the “forward” reading frames), to the best determination. The complementary (antisense) strands are inherently disclosed herein The component sequences which were used to assemble each template consensus sequence are listed in Table 4, along with their positions along the template nucleotide sequences.

[0796] Bins were compared against each other and those having local similarity of at least 82% were combined and reassembled. Reassembled bins having templates of insufficient overlap (less than 95% local identity) were re-split. Assembled templates were also subject to analysis by STITCHER/EXON MAPPER algorithms which analyze the probabilities of the presence of splice variants, alternatively spliced exons, splice junctions, differential expression of alternative spliced genes across tissue types or disease states, etc. These resulting bins were subject to several rounds of the above assembly procedures.

[0797] Once gene bins were generated based upon sequence alignments, bins were clone joined based upon clone information. If the 5′ sequence of one clone was present in one bin and the 3′ sequence from the same clone was present in a different bin, it was likely that the two bins actually belonged together in a single bin. The resulting combined bins underwent assembly procedures to regenerate the consensus sequences.

[0798] The final assembled templates were subsequently annotated using the following procedure. Template sequences were analyzed using BLASTn (v2.0, NCBI) versus gbpri (GenBank version 120). “Hits” were defined as an exact match having from 95% local identity over 200 base pairs through 100% local identity over 100 base pairs, or a homolog match having an E-value, i.e. a probability score, of ≦1×10⁻⁸. The hits were subject to frameshift FASTx versus GENPEPT (GenBank version 120). (See Table 7). In this analysis, a homolog match was defined as having an E-value of ≦1×10⁻⁸. The assembly method used above was described in “System and Methods for Analyzing Biomolecular Sequences,” U.S. Ser. No. 09/276,534, filed Mar. 25, 1999, and the LIFESEQ Gold user manual (Incyte) both incorporated by reference herein.

[0799] Following assembly, template sequences were subjected to motif, BLAST, and functional analyses, and categorized in protein hierarchies using methods described in, e.g., “Database System Employing Protein Function Hierarchies for Viewing Biomolecular Sequence Data,” U.S. Ser. No. 08/812,290, filed Mar. 6, 1997; “Relational Database for Storing Biomolecule Information,” U.S. Ser. No. 08/947,845, filed Oct. 9, 1997; “Project-Based Full-Length Biomolecular Sequence Database,” U.S. Ser. No. 08/811,758, filed Mar. 6, 1997; and “Relational Database and System for Storing Information Relating to Biomolecular Sequences,” U.S. Ser. No. 09/034,807, filed Mar. 4, 1998, all of which are incorporated by reference herein.

[0800] The template sequences were further analyzed by translating each template in all three forward reading frames and searching each translation against the Pfam database of hidden Markov model-based protein families and domains using the HOMER software package (available to the public from Washington University School of Medicine, St. Louis Mo.). Regions of templates which, when translated, contain similarity to Pfam consensus sequences are reported in Table 2, along with descriptions of Pfam protein domains and families. Only those Pfam hits with an E-value of ≦1×10⁻³ are reds (See also World Wide Web site http:/pfam.wustl.edu/for detailed descriptions of Pfam protein domains and families.)

[0801] Additionally, the template sequences were translated in all three forward reading frames, and each translation was searched against hidden Markov models for signal peptides using the HMMER software package. Construction of hidden Markov models and their usage in sequence analysis has been described. (See, for example, Eddy, S. R. (1996) Curr. Opin. Str. Biol. 6:361-365.) Oly those signal peptide hits with a cutoff score of 11 bits or greater are reported. A cutoff score of 11 bits or greater corresponds to at least about 91-94% true-positives in signal peptide prediction. Template sequences were also translated in all three forward reading frames, and each translation was searched against TMAP, a program that uses weight matrices to delineate transmembrane segments on protein sequences and determine orientation, with respect to the cell cytosol (Persson, B. and P. Argos (1994) J. Mol. Biol. 237:182-192; Persson, B. and P. Argos (1996) Protein Sci. 5:363-371). Regions of templates which, when translated, contain similarity to signal peptide or transmembrane consensus sequences are reported in Table 3.

[0802] The results of HMMER analysis as reported in Tables 2 and 3 may support the results of BLAST analysis as reported in Table 1 or may suggest alternative or additional properties of template-encoded polypeptides not previously uncovered by BLAST or other analyses.

[0803] Template sequences are further analyzed using the bioinformatics tools listed in Table 7, or using sequence analysis software known in the art such as MACDNASIS PRO software (Hitachi Software Engineering, South San Francisco Calif.) and LASERGENE software (DNASTAR). Template sequences may be further queried against public databases such as the GenBank rodent, mammalian, vertebrate, prokaryote, and eukaryote databases.

[0804] The template sequences were translated to derive the corresponding longest open reading frame as presented by the polypeptide sequences. Alternatively, a polypeptide of the invention may begin at any of the methionine residues within the full length translated polypeptide. Polypeptide sequences were subsequently analyzed by querying against the GenBank protein database (GENPEPT, (GenBank version 121)). Full length polynucleotide sequences are also analyzed using MACDNASIS PRO software (Hitachi Software Engineering, South San Francisco Calif.) and LASERGENE software (DNASTAR). Polynucleotide and polypeptide sequence alignments are generated using default parameters specified by the CLUSTAL algorithm as incorporated into the MEGALIGN multisequence alignment program (DNASTAR), which also calculates the percent identity between aligned sequences.

[0805] Table 6 shows sequences with homology to the polypeptides of the invention as identified by BLAST analysis against the GenBank protein (GENPEPT) database. Column 1 shows the polypeptide sequence identification number (SEQ ID NO:) for the polypeptide segments of the invention. Column 2 shows the reading frame used in the translation of the polynucleotide sequences encoding the polypeptide segments. Column 3 shows the length of the translated polypeptide segments. Columns 4 and 5 show the start and stop nucleotide positions of the polynucleotide sequences encoding the polypeptide segments. Column 6 shows the GenBank identification number (GI Number) of the nearest GenBank homolog. Column 7 shows the probability score for the match between each polypeptide and its GenBank homolog. Column 8 shows the annotation of the GenBank homolog.

[0806] V. Analysis of Polynucleotide Expression

[0807] Northern analysis is a laboratory technique used to detect the presence of a transcript of a gene and involves the hybridization of a labeled nucleotide sequence to a membrane on which RNAs from a particular cell type or tissue have been bound. (See, e.g., Sambrook, supra, ch. 7; Ausubel, 1995, supra, ch. 4 and 16.)

[0808] Analogous computer techniques applying BLAST were used to search for identical or related molecules in cDNA databases such as GenBank or LIFESEQ (Incyte Genomics). This analysis is much faster than multiple membrane-based hybridizations. In addition, the sensitivity of the computer search can be modified to determine whether any particular match is categorized as exact or similar. The basis of the search is the product score, which is defined as:

$$\frac{BLAST Score \times Percent Identity}{5 \times minimum \{ length ( Seq . 1 ) , length ( Seq . 2 ) \}}$$

[0809] The product score takes into account both the degree of similarity between two sequences and the length of the sequence match. The product score is a normalize value between 0 and 100, and is calculated as follows: the BLAST score is multiplied by the percent nucleotide identity and the product is divided by (5 times the length of the shorter of the two sequences). The BLAST score is calculated by assigning a score of +5 for every base that matches in a high-scoring segment pair (HSP), and 4 for every mismatch. Two sequences may share more than one HSP (separated by gaps). If there is more than one HSP, then the pair with the highest BLAST score is used to calculate the product score. The product score represents a balance between fractional overlap and quality in a BLAST alignment. For example, a product score of 100 is produced only for 100% identity over the entire length of the shorter of the two sequences being compared. A product score of 70 is produced either by 100% identity and 70% overlap at one end, or by 88% identity and 100% overlap at the other. A product score of 50 is produced either by 100% identity and 50% overlap at one end, or 79% identity and 100% overlap:

[0810] VI. Tissue Distribution Profiling

[0811] A tissue distribution profile is determined for each template by compiling the cDNA library tissue classifications of its component cDNA sequences. Each. component sequence, is derived from a cDNA library constructed from a human tissue. Each human tissue is classified into one of the following categories: cardiovascular system; connective tissue; digestive system; embryonic structures; endocrine system; exocrine glands; genitalia, female; genitalia, male; germ cells; hemic and immune system; liver; musculoskeletal system; nervous system; pancreas; respiratory system; sense organs; skin; stomatognathic system; unclassified/mixed; or urinary tract. Template sequences, component sequences, and cDNA library/tissue information are found in the LIFESEQ GOLD database (Incyte Genomics, Palo Alto Calif.).

[0812] Table 5 shows the tissue distribution profile for the templates of the invention. For each template, the three most frequently observed tissue categories are shown in column 3, along with the percentage of component sequences belonging to each category. Only tissue categories with percentage values of ≧10% are shown. A tissue distribution of “widely distributed” in column 3 indicates percentage values of <10% in all tissue categories.

[0813] VII. Transcript Image Analysis

[0814] Transcript images are generated as described in Seilhamer et al., “Comparative Gene Transcript Analysis,” U.S. Pat. No. 5,840,484, incorporated herein by reference.

[0815] VIII. Extension of Polynucleotide Sequences and Isolation of a Full-length cDNA

[0816] Oligonucleotide primers designed using a dithp of the Sequence Listing are used to extend the nucleic acid sequence. One primer is synthesized to initiate 5′ extension of the template, and the other primer, to initiate 3′ extension of the template. The initial primers may be designed using OLIGO 4.06 software (National Biosciences, Inc. (National Biosciences), Plymouth Minn.), or another appropriate program, to be about 22 to 30 nucleotides in length, to have a GC content of about 50% or more, and to anneal to the target sequence at temperatures of about 68° C. to about 72° C.. Any stretch of nucleotides which would result in hairpin structures and primer-primer dimerzations are avoided. Selected human cDNA libraries are used to extend the sequence. If more than one extension is necessary or desired, additional or nested sets of primers are designed.

[0817] High fidelity amplification is obtained by PCR using methods well known in the art PCR is performed in 96-well plates using the PTC-200 thermal cycler (MJ Research). The reaction mix contains DNA template, 200 nmol of each primer, reaction buffer containing Mg²⁺, (NH₄)₂SO₄, and β-mercaptoethanol, Taq DNA polymerase (Amersham Pharmacia Biotech), ELONGASE enzyme (Life Technologies), and Pfu DNA polymerase (Stratagene), with the following parameters for primer pair PCI A and PCI B: Step 1: 94° C., 3 min; Step 2: 94° C., 15 sec; Step 3: 60° C., 1 min; Step 4: 68° C., 2 min; Step 5: Steps 2, 3, and 4 repeated 20 times; Step 6: 68° C., 5 min; Step 7: storage at 4° C. In the alternative, the parameters for primer pair T7 and SK+ are as follows: Step 1: 94° C., 3 min; Step 2: 94° C., 15 sec; Step 3: 57° C., 1 min; Step 4: 68° C., 2 min; Step 5: Steps 2, 3, and 4 repeated 20 times; Step 6: 68° C., 5 min; Step 7: storage at 4° C.

[0818] The concentration of DNA in each well is determined by dispensing 100 μl PICOGREEN quantitation reagent (0.25% (v/v); Molecular Probes) dissolved in 1× Tris-EDTA CE) and 0.5 μl of undiluted PCR product into each well of an opaque fluorimeter plate (Corning Incorporated (Corning), Corning N.Y.), allowing the DNA to bind to the reagent. The plate is scanned in a FLUOROSKAN II Labsystems Oy) to measure the fluorescence of the sample and to quantify the concentration of DNA A 5 μl to 10 μl aliquot of the reaction mixture is analyzed by electrophoresis on a 1% agarose mini-gel to determine which reactions are successful in extending the sequence.

[0819] The extended nucleotides are desalted and concentrated, transferred to 384-well plates, digested with CviJI cholera virus endonuclease (Molecular Biology Research, Madison Wis.), and sonicated or sheared prior to religation into pUC 18 vector (Amersham Pharmacia Biotech). For shotgun sequencing, the digested nucleotides are separated on low concentration (0.6 to 0.8%) agarose gels, fragments are excised, and agar digested with AGAR ACE (Promega). Extended clones are reilgated using T4 ligase (New England Biolabs, Inc., Beverly Mass.) into pUC 18 vector (Amersham Pharmacia Biotech), treated with Pfu DNA polymerase (Stratagene) to fill-in restriction site overhangs, and transfected into competent E. coli cells. Transformed cells are selected on antibiotic-containing media, individual colonies are picked and cultured overnight at 37° C. in 384-well plates in LB/2x carbenicillin liquid media.

[0820] The cells are lysed, and DNA is amplified by PCR using Taq DNA polymerase (Amersham Pharmacia Biotech) and Pfu DNA polymerase (Stratagene) with the following parameters: Step 1: 94° C., 3 min; Step 2: 94° C., 15 sec; Step 3: 60° C., 1 min; Step 4: 72° C., 2min; Step 5: steps 2, 3, and 4 repeated 29 times; Step 6: 72° C., 5 min; Step 7: storage at 4° C. DNA is quantified by PICOGREEN reagent (Molecular Probes) as described above. Samples with low DNA recoveries are reamplified using the same conditions as described above. Samples are diluted with 20% dimethysulfoxide (1:2, v/v), and sequenced using DYENAMIC energy transfer sequencing primers and the DYENAMIC DIRECT kit (Amersham Pharmacia Biotech) or the ABI PRISM BIGDYE Terminator cycle sequencing ready reaction kit (Applied Biosystems).

[0821] In like manner, the dithp is used to obtain regulatory sequences (promoters, introns, and enhancers) using the procedure above, oligonucleotides designed for such extension, and an appropriate genomic library.

[0822] IX. Labeling of Probes and Southern Hybridization Analyses

[0823] Hybridization probes derived from the dithp of the Sequence Listing are employed for screening cDNAs, mRNAs, or genomic DNA. The labeling of probe nucleotides between 100 and 1000 nucleotides in length is specifically described, but essentially the same procedure may be used with larger cDNA fragments. Probe sequences are labeled at room temperature for 30 minutes using a T4 polynucleotide kinase, γ³²P-ATP, and 0.5× One-Phor-All Plus (Amersham Pharmacia Biotech) buffer and purified using a ProbeQuant G-50 Microcolumn (Amersham Pharmacia Biotech). The probe mixture is diluted to 10⁷ dpm/μg/ml hybridization buffer and used in a typical membrane-based hybridization analysis.

[0824] The DNA is digested with a restriction endonuclease such as Eco RV and is electrophoresed through a 0.7% agarose gel. The DNA fragments are transferred from the agarose to nylon membrane (NYTRAN Plus, Schleicher & Schuell, Inc., Keene N. H.) using procedures specified by the manufacturer of the membrane. Prehybridization is carried out for three or more hours at 68° C., and hybridization is carried out overnight at 68° C. To remove non-specific signals, blots are sequentially washed at room temperature under increasingly stringent conditions, up to 0.1× saline sodium citrate (SSC) and 0.5% sodium dodecyl sulfate. After the blots are placed in a PHOSPHORIMAGER cassette (Molecular Dynamics) or are exposed to autoradiography film, hybridization patterns of standard and experimental lanes are compared. Essentially the same procedure is employed when screening RNA.

[0825] X. Chromosome Mapping of dithp

[0826] The cDNA sequences which were used to assemble SEQ ID NO:1-211 are compared with sequences from the Incyte LIFESEQ database and public domain databases using BLAST and other implementations of the Smith-Waterman algorithm. Sequences from these databases that match SEQ ID NO:1-211 are assembled into clusters of contiguous and overlapping sequences using assembly algorithms such as PHRAP (Table 7). Radiation hybrid and genetic mapping data available from public resources such as the Stanford Human Genome Center (SHGC), Whitehead Institute for Genome Research (WIGR), and Généthon are used to determine if any of the clustered sequences have been previously mapped. Inclusion of a mapped sequence in a cluster will result in the assignment of all sequences of that cluster, including its particular SEQ ID NO:, to that map location. The genetic map locations of SEQ ID NO:1-211 are described as ranges, or intervals, of human chromosomes. The map position of an interval, in centiMorgans, is measured relative to the terminus of the chromosome's p-arm. (The centiMorgan (cM) is a unit of measurement based on recombination frequencies between chromosomal markers. On average, 1 cM is roughly equivalent to 1 megabase (Mb) of DNA in humans, although this can vary widely due to hot and cold spots of recombination.) The cM distances are based on genetic markers mapped by Généthon which provide boundaries for radiation hybrid markers whose sequences were included in each of the clusters.

[0827] XI. Microarray Analysis

[0828] Probe Preparation from Tissue or Cell Samples

[0829] Total RNA is isolated from tissue samples using the guanidinium thiocyanate method and polyA⁺ RNA is purified using the oligo (dT) cellulose method Each polyA⁺ RNA sample is reverse transcribed using MMLV reverse-transcriptase, 0.05 pg/μl oligo-dT primer (21mer), 1×first strand buffer, 0.03 units/μl RNase inhibitor, 500 μM dATP, 500 μM dGTP, 500 μM d=TP, 40 μM dCTP, 40 μM dCTP-Cy3 (BDS) or dCTP-Cy5 (Amersham Pharmacia Biotech). The reverse transcription reaction is performed in a 25 ml volume containing 200 ng polyA⁺ RNA with GEMBRIGHT kits (Incyte). Specific control polyA⁺ RNAs are synthesized by in vitro transcription from non-coding yeast genomic DNA (W. Lei, unpublished). As quantitative controls, the control mRNAs at 0.002 ng, 0.02 ng, 0.2 ng, and 2 ng are diluted into reverse transcription reaction at ratios of 1:100,000, 1:10,000, 1:1000, 1:100 (w/w) to sample mRNA respectively. The control mRNAs are diluted into reverse transcription reaction at ratios of 1:3, 3:1, 1:10, 10:1, 1:25, 25:1 (w/w) to sample mRNA differential expression patterns. After incubation at 370 C for 2 br, each reaction sample (one with Cy3 and another with Cy5 labeling) is treated with 2.5 ml of 0.5M sodium hydroxide and incubated for 20 minutes at 85° C. to the stop the reaction and degrade the RNA Probes are purified using two successive CHROMA SPIN 30 gel filtration spin columns (CLONTECH Laboratories, Inc. (CLONTECH), Palo Alto Calif.) and after combining, both reaction samples are ethanol precipitated using 1 ml of glycogen (1 mg/ml), 60 ml sodium acetate, and 300 ml of 100% ethanol. The probe is then dried to completion using a SpeedVAC (Savant Instruments Inc., HoIbrook N.Y.) and resuspended in 14 μl 5×SSC/0.2%

[0830] SDS.

[0831] Microarray Preparation

[0832] Sequences of the present invention are used to generate array elements. Each array element is amplified from bacterial cells containing vectors with cloned cDNA inserts. PCR amplification uses primers complementary to the vector sequences flanking the cDNA insert. Array elements are amplified in thirty cycles of PCR from an initial quantity of 1-2 ng to a final quantity greater than 5 μg. Amplified array elements are then purified using SEPHACRYL-400 (Amersham Pharmacia Biotech).

[0833] Purified array elements are immobilized on polymer-coated glass slides. Glass microscope slides (Corning) are cleaned by ultrasound in 0.1% SDS and acetone, with extensive distilled water washes between and after treatments. Glass slides are etched in 4% hydrofluoric acid (VWR Scientific Products Corporation (VWR), West Chester, Pa.), washed extensively in distilled water, and coated with 0.05% aminopropyl silane (Sigma) in 95% ethanol. Coated slides are cured in a 110° C. oven.

[0834] Array elements are applied to the coated glass substrate using a procedure described in U.S. Pat. No. 5,807,522, incorporated herein by reference. 1 μl of the array element DNA, at an average concentration of 100 ng/μl, is loaded into the open capillary printing element by a high-speed robotic apparatus. The apparatus then deposits about 5 nl of array element sample per slide.

[0835] Microarrays are UV-crosslinked using a STRATALINKER UV-crosslinker (Stratagene). Microarrays are washed at room temperature once in 0.2% SDS and three times in distilled water. Non-specific binding sites are blocked by incubation of microarrays in 0.2% casein in phosphate buffered saline (PBS) (Tropix, Inc., Bedford, Mass.) for 30 minutes at 60° C. followed by washes in 0.2% SDS and distilled water as before.

[0836] Hybridization

[0837] Hybridization reactions contain 9 μl of probe mixture consisting of 0.2 μg each of Cy3 and Cy5 labeled cDNA synthesis products in 5×SSC, 0.2% SDS hybridization buffer. The probe mixture is heated to 65° C. for 5 minutes and is aliquoted onto the microarray surface and covered with an 1.8 cm² coverslip. The arrays are transferred to a waterproof chamber having a cavity just slightly larger than a microscope slide. The chamber is kept at 100% humidity internally by the addition of 140 μl of 5×SSC in a corner of the chamber. The chamber containing the arrays is incubated for about 6.5 hours at 60° C. The arrays are washed for 10 min at 45° C. in a first wash buffer (1×SSC, 0.1% SDS), three times for 10 minutes each at 45° C. in a second wash buffer (0.1×SSC), and dried

[0838] Detection

[0839] Reporter-labeled hybridization complexes are detected with a microscope equipped with an Innova 70 mixed gas 10 W laser (Coherent, Inc., Santa Clara Calif.) capable of generating spectral lines at 488 nm for excitation of Cy3 and at 6321n for excitation of Cy5. The excitation laser light is focused on the array using a 20×microscope objective (Nikon, Inc., Melville N.Y.). The slide containing the array is placed on a computer-controlled X-Y stage on the microscope and raster-scanned past the objective. The 1.8 cm×1.8 cm array used in the present example is scanned with a resolution of 20 micrometers.

[0840] In two separate scans, a mixed gas multiline laser excites the two fluorophores sequentially. Emitted light is split, based on wavelength, into two photomultiplier tube detectors (PMT R1477, Hamamatsu Photonics Systems, Bridgewater N.J.) corresponding to the two fluorophores. Appropriate filters positioned between the array and the photomultiplier tubes are used to filter the signals. The emission maxima of the fluorophores used are 565 nm for Cy3 and 650 nm for Cy5. Each array is typically scanned twice, one scan per fluorophore using the appropriate filters at the laser source, although the apparatus is capable of recording the spectra from both fluorophores simultaneously.

[0841] The sensitivity of the scans is typically calibrated using the signal intensity generated by a cDNA control species added to the probe mix at a known concentration. A specific location on the array contains a complementary DNA sequence, allowing the intensity of the signal at that location to be correlated with a weight ratio of hybridizing species of 1:100,000. When two probes from different sources (e g., representing test and control cells), each labeled with a different fluorophore, are hybridized to a single array for the purpose of identifying genes that are differentially expressed, the calibration is done by labeling samples of the calibrating cDNA with the two fluorophores and adding identical amounts of each to the hybridization mixture.

[0842] The output of the photomultiplier tube is digitized using a 12-bit RTI-835H analog-to-digital (A/D) conversion board (Analog Devices, Inc., Norwood, Mass.) installed in an IBM-compatible PC computer. The digitized data are displayed as an image where the signal intensity is mapped using a linear 20-color transformation to a pseudocolor scale ranging from blue (low signal) to red (high signal). The data is also analyzed quantitatively. Where two different fluorophores are excited and measured simultaneously, the data are first corrected for optical crosstalk (due to overlapping emission spectra) between the fluorophores using each fluorophore's emission spectrum.

[0843] A grid is superimposed over the fluorescence signal image such that the signal from each spot is centered in each element of the grid. The fluorescence signal win each element is then integrated to obtain a numerical value corresponding to the average intensity of the signal. The software used for signal analysis is the GEMTOOLS gene expression analysis program (Incyte).

[0844] XII. Complementary Nucleic Acids

[0845] Sequences complementary to the dithp are used to detect, decrease, or inhibit expression of the naturally occurring nucleotide. The use of oligonucleotides comprising from about 15 to 30 base pairs is typical in the art. However, smaller or larger sequence fragments can also be used. Appropriate oligonucleotides are designed from the dithp using OLIGO 4.06 software (National Biosciences) or other appropriate programs and are synthesized using methods standard in the art or ordered from a commercial supplier. To inhibit transcription, a complementary oligonucleotide is designed from the most unique 5′ sequence and used to prevent transcription factor binding to the promoter sequence. To inhibit translation, a complementary oligonucleotide is designed to prevent ribosomal binding and processing of the transcript

[0846] XIII. Expression of DITHP

[0847] Expression and purification of DITHP is accomplished using bacterial or virus-based expression systems. For expression of DITHP in bacteria, cDNA is subcloned into an appropriate vector containing an antibiotic resistance gene and an inducible promoter that directs high levels of cDNA transcription. Examples of such promoters include, but are not limited to, the trp-lac (tac) hybrid promoter and the T5 or T7 bacteriophage promoter in conjunction with the lac operator regulatory element. Recombinant vectors are transformed into suitable bacterial hosts, e.g., BL21(DE3). Antibiotic resistant bacteria express DITHP upon induction with isopropyl beta-D-thiogalactopyranoside (IPTG). Expression of DITHP in eukaryotic cells is achieved by infecting insect or mammalian cell lines with recombinant Autosraphica californica nuclear polyhedrosis virus (AcMNPV), commonly known as baculovirus. The nonessential polyhedrin gene of baculovirus is replaced with cDNA encoding DITHP by either homologous recombination or bacterial-mediated transposition involving transfer plasmid intermediates. Viral infectivity is maintained and the strong polyhedrin promoter drives high levels of cDNA transcription. Recombinant baculovirus is used to infect Spodoptera fruiperda (Sf9) insect cells in most cases, or human hepatocytes, in some cases. Infection of the latter requires additional genetic modifications to baculovirus. (See e.g., Engelhard, supra; and Sandig, supra.)

[0848] In most expression systems, DITHP is synthesized as a fusion protein with, e.g., glutathione S-transferase (GST) or a peptide epitope tag, such as FLAG or 6-His, permitting rapid, single-step, affinity-based purification of recombinant fusion protein from crude cell lysates. GST, a 26-kilodalton enzyme from Schistosoma japonicum, enables the purification of fusion proteins on immobilized glutathione under conditions that maintain protein activity and antigenicity (Amersham Pharmacia Biotech). Following purification, the GST moiety can be proteolytically cleaved from DITHP at specifically engineered sites. FLAG, an 8-amino acid peptide, enables immunoaffnity purification using commercially available monoclonal and polyclonal anti-FLAG antibodies (Eastman Kodak Company, Rochester N.Y.). 6-His, a stretch of six consecutive histidine residues, enables purification on metal chelate resins (QIAGEN). Methods for protein expression and purification are discussed in Ausubel (1995, supra, Chapters 10 and 16). Purified DITh=obtained by these methods can be used directly in the following activity assay.

[0849] XIV. Demonstration of DITHP Activity

[0850] DITHP activity is demonstrated through a variety of specific assays, some of which are outlined below.

[0851] Oxidoreductase activity of DITHP is measured by the increase in extinction coefficient of NAD(P)H coenzyme at 340 nm for the measurement of oxidation activity, or the decrease in extinction coefficient of NAD(P)H coenzyme at 340 nm for the measurement of reduction activity (Dalziel, K. (1963) J. Biol. Chem. 238:2850-2858). One of three substrates may be used: Asn-βGal, biocytidine, or ubiquinone-10. The respective subunits of the enzyme reaction, for example, cytochtome c₁-b oxidoreductase and cytochrome c, are reconstituted. The reaction mixture contains a)1-2 mg/ml DITHP; and b) 15 mM substrate, 2.4 mM NAD(P)⁺in 0.1 M phosphate buffer, pH 7.1 (oxidation reaction), or 2.0 mM NAD(P)H, in 0.1 M Na₂HPO₄ buffer, pH 7.4 (reduction reaction); in a total volume of 0.1 ml. Changes in absorbance at 340 nm (A340) are measured at 23.5° C. using a recording spectrophotometer (Shimadzu Scientific Instruments, Inc., Pleasanton Calif.). The amount of NAD(P)H is stoichiometrically equivalent to the amount of substrate initially present, and the change in A₃₄₀ is a direct measure of the amount of NAD(P)H produced; ΔA₃₄₀=6620[NADH]. Oxidoreductase activity of DITHP activity is proportional to the amount of NAD(P)H present in the assay.

[0852] Transferase activity of DITHP is measured through assays such as a methyl transferase assay in which the transfer of radiolabeled methyl groups between a donor substrate and an acceptor substrate is measured (Bokar, J. A. et al. (1994) J. Biol. Chem. 269:17697-17704). Reaction mixtures (50 μl final volume) contain 15 mM HEPES, pH 7.9, 1.5 mM MgCl₂, 10 mM dithiothreitol, 3% polyvinylalcohol, 1.5 μCi [methyl-³H]AdoMet (0.375 μM AdoMet) (DuPont-NEN), 0.6 μg DITHP, and acceptor substrate (0.4 μg [³⁵S]RNA or 6-mercaptopurine (6-MP) to 1 mM final concentration). Reaction mixtures are incubated at 30° C. for 30 minutes, then 65° C. for 5 minutes. The products are separated by chromatography or electrophoresis and the level of methyl transferase activity is determined by quantification of methyl-3H recovery.

[0853] DITHP hydrolase activity is measured by the hydrolysis of appropriate synthetic peptide substrates conjugated with various chromogenic molecules in which the degree of hydrolysis is quantified by spectrophotometric (or fluorometric) absorption of the released chromophore. (Beynon, R. J. and J. S. Bond (1994) Proteolytic Enzymes: A Practical Approach, Oxford University Press, New York N.Y., pp. 25-55) Peptide substrates are designed according to the category of protease activity as endopeptidase (serine, cysteine, aspartic proteases), animopeptidase (leucine aminopeptidase), or carboxypeptidase (Carboxypeptidase A and B, procollagen C-proteinase).

[0854] DITHP isomerase activity such as peptidyl prolyl cis/trans isomerase activity can be assayed by an enzyme assay described by Rahfeld, J. U., et al. (1994) (FEBS Let 352:180-184). The assay is performed at 10° C. in 35 mM HEPES buffer, pH 7.8, containing chymotrypsin (0.5 mg/ml) and DITHP at a variety of concentrations. Under these assay conditions, the substrate, Suc-Ala-Xaa-Pro-Phe-4-NA, is in equilibrium with respect to the prolyl bond, with 80-95% in trans and 5-20% in cis conformation. An aliquot (2 ul) of the substrate dissolved in dimethyl sulfoxide (10 mg/ml) is added to the reaction mixture described above. Only the cis isomer of the substrate is a substrate for cleavage by chymotrypsin. Thus, as the substrate is isomerized by DITHP, the product is cleaved by chymotrypsin to produce 4-nitroanilide, which is detected by it's absorbance at 390 nm. 4 Nitroanilide appears in a time-dependent and a DITHP concentration-dependent manner.

[0855] An assay for DITHP activity associated with growth and development measures cell proliferation as the amount of newly initiated DNA synthesis in Swiss mouse 3T3 cells. A plasmid containing polynucleotides encoding DITHP is transfected into quiescent 3T3 cultured cells using methods well known in the art. The transiently transfected cells are then incubated in the presence of [³H]thymidine, a radioactive DNA precursor. Where applicable, varying amounts of DITHP ligand are added to the transfected cells. Incorporation of [³H]thymidine into acid-precipitable DNA is measured over an appropriate time interval, and the amount incorporated is directly proportional to the amount of newly synthesized DNA.

[0856] Growth factor activity of DITHP is measured by the stimulation of DNA synthesis in Swiss mouse 3T3 cells (McKay, I. and L. Leigh, eds. (1993) Growth Factors: A Practical Approach, Oxford University Press, New York N.Y.). Initiation of DNA synthesis indicates the cells' entry into the mitotic cycle and their commitment to undergo later division 3T3 cells are competent to respond to most growth factors, not only those that are mitogenic, but also those that are involved in embryonic induction. This competence is possible because the in vivo specificity demonstrated by some growth factors is not necessarily inherent but is determined by the responding tissue. In this assay, varying amounts of DITHP are added to quiescent 3T3 cultured cells in the presence of [³H]thymidine, a radioactive DNA precursor. DITHP for this assay can be obtained by recombinant means or from biochemical preparations. Incorporation of [³H]thymidine into acid-precipitable DNA is measured over an appropriate time interval, and the amount incorporated is directly proportional to the amount of newly synthesized DNA A linear dose-response curve over at least a hundred-fold DITHP concentration range is indicative of growth factor activity. One unit of activity per milliliter is defined as the concentration of DITHP producing a 50% response level, where 100% represents maximal incorporation of [³H]thymidine into acid-precipitable DNA.

[0857] Alternatively, an assay for cytokine activity of DITHP measures the proliferation of leukocytes. In this assay, the amount of tritiated thymidine incorporated into newly synthesized DNA is used to estimate proliferative activity. Varying amounts of DITHP are added to cultured leukocytes, such as granulocytes, monocytes, or lymphocytes, in the presence of [³H]thymidine, a radioactive DNA precursor. DITHP for this assay can be obtained by recombinant means or from biochemical preparations. Incorporation of [³H]thymidine into acid-precipitable DNA is measured over an appropriate time interval, and the amount incorporated is directly proportional to the amount of newly synthesized DNA. A linear dose-response curve over at least a hundred-fold DITHP concentration range is indicative of DITHP activity. One unit of activity per milliliter is conventionally defined as the concentration of DITHP producing a 50% response level, where 100% represents maximal incorporation of [³H]thymidine into acid-precipitable DNA.

[0858] An alternative assay for DITHP cytokine activity utilizes a Boyden micro chamber (Neuroprobe, Cabin John M.D.) to measure leukocyte chemotaxis (Vicari, supra). In this assay, about 10⁵ migratory cells such as macrophages or monocytes are placed in cell culture media in the upper compartment of the chamber. Varying dilutions of DITHP are placed in the lower compartment. The two compartments are separated by a 5 or 8 micron pore polycarbonate filter (Nucleopore, Pleasanton Calif.). After incubation at 37° C. for 80 to 120 minutes, the filters are fixed in methanol and stained with appropriate labeling agents. Cells which migrate to the other side of the filter are counted using standard microscopy. The chemotactic index is calculated by dividing the number of migratory cells counted when DITHP is present in the lower compartment by the number of migratory cells counted when only media is present in the lower compartment. The chemotactic index is proportional to the activity of DITHP.

[0859] Alternatively, cell lines or tissues transformed with a vector containing dithp can be assayed for DITHP activity by immunoblotting. Cells are denatured in SDS in the presence of β-mercaptoethanol, nucleic acids removed by ethanol precipitation, and proteins purified by acetone precipitation. Pellets are resuspended in 20 mM tris buffer at pH 7.5 and incubated with Protein G-Sepharose pre-coated with an antibody specific for DITHP. After washing, the Sepharose beads are boiled in electrophoresis sample buffer, and the eluted proteins subjected to SDS-PAGE. The SDS-PAGE is transferred to a nitrocellulose membrane for immunoblotting, and the DITHP activity is assessed by visualizing and quantifying bands on the blot using the antibody specific for DITHP as the primary antibody and ¹²⁵I-labeled IgG specific for the primary antibody as the secondary antibody.

[0860] DITHP kinase activity is measured by phosphorylation of a protein substrate using γ-labeled [³²p]-ATP and quantitation of the incorporated radioactivity using a radioisotope counter. DITHP is incubated with the protein substrate, [³²P]-ATP, and an appropriate kinase buffer. The [³²P] incorporated into the product is separated from free [³²]-ATP by electrophoresis and the incorporated [³²P] is counted. The amount of [³²P] recovered is proportional to the kinase activity of DITHP in the assay. A determination of the specific amino acid residue phosphorylated is made by phosphoamino acid analysis of the hydrolyzed protein.

[0861] In the alternative, DITHP activity is measured by the increase in cell proliferation resulting from transformation of a mammalian cell line such as COS7, HeLa or CHO with an eukaryotic expression vector encoding DITHP. Eukaryotic expression vectors are commercially available, and the techniques to introduce them into cells are well known to those skilled in the art. The cells are incubated for 48-72 hours after transformation under conditions appropriate for the cell line to allow expression of DITHP. Phase microscopy is then used to compare the mitotic index of transformed versus control cells. An increase in the mitotic index indicates DITHP activity.

[0862] In a further alternative, an assay for DITHP signaling activity is based upon the ability of GPCR family proteins to modulate G protein-activated second messenger signal transduction pathways (e.g., cAMP; Gaudin, P. et al. (1998) J. Biol. Chem. 273:4990-4996). A plasmid encoding full length DITHP is transfected into a mammalian cell line (e.g., Chinese hamster ovary (CHO) or human embryonic kidney (HEK-293) cell lines) using methods well-known in the art. Transfected cells are grown in 12-well trays in culture medium for 48 hours, then the culture medium is discarded, and the attached cells are gently washed with PBS. The cells are then incubated in culture medium with or without ligand for 30 minutes, then the medium is removed and cells lysed by treatment with 1 M perchloric acid. The cAMP levels in the lysate are measured by radioimmunoassay using methods well-known in the art. Changes in the levels of cAMP in the lysate from cells exposed to ligand compared to those without ligand are proportional to the amount of DITHP present in the transfected cells.

[0863] Alternatively, an assay for DITHP protein phosphatase activity measures the hydrolysis of P-nitrophenyl phosphate (PNPP). DITHP is incubated together with PNPP in HEPES buffer pH 7.5, in the presence of 0.1% β-mercaptoethanol at 37° C. for 60 min. The reaction is stopped by the addition of 6 ml of 10 N NaOH, and the increase in light absorbance of the reaction mixture at 410 nm resulting from the hydrolysis of PNPP is measured using a spectrophotometer. The increase in light absorbance is proportional to the phosphatase activity of DITHP in the assay (Diamond, R. H. et al (1994) Mol Cell Biol 14:3752-3762).

[0864] An alternative assay measures DITHP-mediated G-protein signaling activity by monitoring the mobilization of Ca⁺⁺ as an indicator of the signal transduction pathway stimulation. (See, e.g., Grynkievicz, G. et al. (1985) J. Biol. Chem. 260:3440; McColl, S. et al. (1993) J. Immunol. 150:4550-4555; and Aussel, C. et al. (1988) J. Immunol. 140:215-220). The assay requires preloading neutrophils or T cells with a fluorescent dye such as FURA-2 or BCECF (Universal Imaging Corp, Westchester Pa.) whose emission characteristics are altered by Ca⁺⁺ binding. When the cells are exposed to one or more activating stimuli artificially (e.g., anti-CD3 antibody ligation of the T cell receptor) or physiologically (e.g., by allogeneic stimulation), Ca⁺⁺ flux takes place. This flux can be observed and quantified by assaying the cells in a fluorometer or fluorescent activated cell sorter. Measurements of Ca⁺⁺ flux are compared between cells in their normal state and those transfected with DITHP. Increased Ca⁺⁺ mobilization attributable to increased DITHP concentration is proportional to DITHP activity.

[0865] DITHP transport activity is assayed by measuring uptake of labeled substrates into Xenopus laevis oocytes. Oocytes at stages V and VI are injected with DITHP mRNA (10 ng per oocyte) and is incubated for 3 days at 18° C. in OR2 medium (82.5 mM NaCl, 2.5 mM KCl, 1 mM CaCl₂, 1 mM MgCl₂, 1 mM Na₂HPO₄, 5 mM Hepes, 3.8 mM NaOH, 50 μg/ml gentamycin, pH 7.8) to allow expression of DITHP protein. Oocytes are then transferred to standard uptake medium (100 mM NaCl, 2 mM KCl, 1 mM CaCl₂, 1 mM MgCl₂, 10 mM Hepes/Tris pH 7.5). Uptake of various substrates (e.g., amino acids, sugars, drugs, ions, and neurotransmitters) is initiated by adding labeled substrate (e.g. radiolabeled with ³H, fluorescently labeled with rhodamine, etc.) to the oocytes. After incubating for 30 minutes, uptake is terminated by washing the oocytes three times in Na⁺-free medium, measuring the incorporated label, and comparing with controls. DITHP transport activity is proportional to the level of internalized labeled substrate.

[0866] DITHP transferase activity is demonstrated by a test for galactosyltransferase activity. This can be determined by measuring the transfer of radiolabeled galactose from UDP-galactose to a GlcNAc-terminated oligosaccharide chain (Kolbinger, F. et al. (1998) J. Biol. Cheri 273:58-65). The sample is incubated with 14 μl of assay stock solution (180 mM sodium cacodylate, pH 6.5, 1 mg/ml bovine serum albumin, 0.26 mM UDP-galactose, 2 μl of UDP-[³H]galactose), 1 μl of MnCl₂ (500 mM), and 2.5 μl of GlcNAcβO—(CH₂)₈—CO₂Me (37 mg/ml in dimethyl sulfoxide) for 60 minutes at 37° C. The reaction is quenched by the addition of 1 ml of water and loaded on a C18 Sep-Pak cartridge (Waters), and the column is washed twice with 5 ml of water to remove unreacted UDP-[³H]galactose. The [³H]galactosylated GlcNAcβO—(CH₂)₈—CO₂Me remains bound to the column during the water washes and is eluted with 5 ml of methanol. Radioactivity in the eluted material is measured by liquid scintillation counting and is proportional to galactosyltransferase activity in the starting sample.

[0867] In the alternative, DITHP induction by heat or toxins may be demonstrated using primary cultures of human fibroblasts or human cell lines such as CCL-13, HEK293, or HEP G2 (ATCC). To heat induce DITHP expression, aliquots of cells are incubated at 42° C. for 15, 30, or 60 minutes. Control aliquots are incubated at 37° C. for the same time periods. To induce DITHP expression by toxins, aliquots of cells are treated with 100 μM arsenite or 20 mM azetidine-2-carboxylic acid for 0, 3, 6, or 12 hours. After exposure to heat, arsenite, or the amino acid analogue, samples of the treated cells are harvested and cell lysates prepared for analysis by western blot. Cells are lysed in lysis buffer containing 1% Nonidet P40, 0.15 M NaCl, 50 mM Tris-HCl, 5 mM EDTA, 2 mM N-ethylmaleimide, 2 mM phenylmethylsulfonyl fluoride, 1 mg/ml leupeptin, and 1 mg/ml pepstatin. Twenty micrograms of the cell lysate is separated on an 8% SDS-PAGE gel and transferred to a membrane. After blocking with 5% nonfat dry milk/phosphate-buffered saline for 1 h, the membrane is incubated overnight at 4° C. or at room temperature for 24 hours with a 1:1000 dilution of anti-DITHP serum in 2% nonfat dry milk/phosphate-buffered saline. The membrane is then washed and incubated with a 1:1000 dilution of horseradish peroxidase-conjugated goat anti-rabbit IgG in 2% dry milk/phosphate-buffered saline. After washing with 0.1% Tween 20 in phosphate-buffered saline, the DITHP protein is detected and compared to controls using chemiluminescence.

[0868] Alternatively, DITHP protease activity is measured by the hydrolysis of appropriate synthetic peptide substrates conjugated with various chromogenic molecules in which the degree of hydrolysis is quantified by spectrophotometric (or fluorometric) absorption of the released chromophore (Beynon, R. J. and J. S. Bond (1994) Proteolytic Enzymes: A Practical Approach, Oxford University Press, New York, N.Y., pp.25-55). Peptide substrates are designed according to the category of protease activity as endopeptidase (serine, cysteine, aspartic proteases, or metalloproteases), aminopeptidase (leucine aminopeptidase), or carboxypeptidase (carboxypeptidases A and B, procollagen C-proteinase). Commonly used chromogens are 2-naphthylamine, 4-nitroaniline, and furylacrylic acid. Assays are performed at ambient temperature and contain an aliquot of the enzyme and the appropriate substrate in a suitable buffer. Reactions are carried out in an optical cuvette, and the increase/decrease in absorbance of the chromogen released during hydrolysis of the peptide substrate is measured. the change in absorbance is proportional to the DITHP protease activity in the assay.

[0869] In the alternative, an assay for DITHP protease activity takes advantage of fluorescence resonance energy transfer (FRET) that occurs when one donor and one acceptor fluorophore with an appropriate spectral overlap are in close proximity. A flexible peptide linker containing a cleavage site specific for PRTS is fused between a red-shifted variant (RSGFP4) and a blue variant (BFP5) of Green Fluorescent Protein. This fusion protein has spectral properties that suggest energy transfer is occurring from BFP5 to RSGFP4. When the fusion protein is incubated with DITHP, the substrate is cleaved, and the two fluorescent proteins dissociate. This is accompanied by a marked decrease in energy transfer which is quantified by comparing the emission spectra before and after the addition of DITHP (Mitra, R. D. et al (1996) Gene 173:13-17). This assay can also be performed in living cells. In this case the fluorescent substrate protein is expressed constitutively in cells and DITHP is introduced on an inducible vector so that FRET can be monitored in the presence and absence of DITHP (Sagot, I. et al (1999) FEBS Lett. 447:53-57).

[0870] A method to determine the nucleic acid binding activity of DITHP involves a polyacrylamide gel mobility-shift assay. In preparation for this assay, DITHP is expressed by transforming a mammalian cell line such as COS7, HeLa or CHO with a eukaryotic expression vector containing DITHP cDNA. The cells are incubated for 48-72 hours after transformation under conditions appropriate for the cell line to allow expression and accumulation of DITHP. Extracts containing solubilized proteins can be prepared from cells expressing DITHP by methods well known in the art Portions of the extract containing DITHP are added to [³²P]-labeled RNA or DNA. Radioactive nucleic acid can be synthesized in vitro by techniques well known in the art The mixtures are, incubated at 25° C. in the presence of RNase- and DNase-inhibitors under buffered conditions for 5-10 minutes. After incubation, the samples are analyzed by polyacrylamide gel electrophoresis followed by autoradiography. The presence of a band on the autoradiogram indicates the formation of a complex between DITHP and the radioactive transcript. A band of similar mobility will not be present in samples prepared using control extracts prepared from untransformed cells.

[0871] In the alternative, a method to determine the methylase activity of a DITHP measures transfer of radiolabeled methyl groups between a donor substrate and an acceptor substrate. Reaction mixtures (50 μl final volume) contain 15 mM HEPES, pH 7.9, 1.5 mM MgCl₂, 10 mM dithiothreitol, 3% polyvinylalcohol, 1.5 μCi [methyl-³H]AdoMet (0.375 μM AdoMet) (DuPont-NEN), 0.6 μg DITHP, and acceptor substrate (e.g., 0.4 μg [³⁵S]RNA, or 6-mercaptopurine (6-MP) to 1 mM final concentration). Reaction mixtures are incubated at 30° C. for 30 minutes, then 65° C. for 5 minutes. Analysis of [methyl-³H]RNA is as follows: 1) 50 μl of 2×loading buffer (20 mM Tris-HCl, pH 7.6, 1 M LiCl, 1 mM EDTA, 1% sodium dodecyl sulphate (SDS)) and 50 μl oligo d(T)-cellulose (10 mg/ml in 1×loading buffer) are added to the reaction mixture, and incubated at ambient temperature with shaking for 30 minutes. 2) Reaction mixtures are transferred to a 96-well filtration plate attached to a vacuum apparatus. 3) Each sample is washed sequentially with three 2.4 ml aliquots of 1×oligo d(T) loading buffer containing 0.5% SDS, 0.1% SDS, or no SDS. and 4) RNA is eluted with 300 μl of water into a 96-well collection plate, transferred to scintillation vials containing liquid scintillant, and radioactivity determined. Analysis of [methyl-³H]6-MP is as follows: 1) 500 μl 0.5 M borate buffer, pH 10.0, and then 2.5 ml of 20% (v/v) isoamyl alcohol in toluene are added to the reaction mixtures. 2) The samples mixed by vigorous vortexing for ten seconds. 3) After centrifugation at 700 g for 10 minutes, 1.5 ml of the organic phase is transferred to scintillation vials containing 0.5 ml absolute ethanol and liquid scintillant, and radioactivity determined. and 4) Results are corrected for the extraction of 6-MP into the organic phase (approximately 41%).

[0872] An assay for adhesion activity of DITHP measures the disruption of cytoskeletal filament networks upon overexpression of DITHP in cultured cell lines (Rezniczek, G. A. et al. (1998) J. Cell Biol. 141:209-225). cDNA encoding DITHP is subcloned into a mammalian expression vector that drives high levels of cDNA expression. This construct is transfected into cultured cells, such as rat kangaroo PtK2 or rat bladder carcinoma 804G cells. Actin filaments and intermediate filaments such as keratin and vimentin are visualized by immunofluorescence microscopy using antibodies and techniques well known in the art. The configuration and abundance of cytoskeletal filaments can be assessed and quantified using confocal imaging techniques. In particular, the bundling and collapse is of cytoskeletal filament networks is indicative of DITHP adhesion activity.

[0873] Alternatively, an assay for DITHP activity measures the expression of DITHP on the cell surface. cDNA encoding DITHP is transfected into a non-leukocytic cell line. Cell surface proteins are labeled with biotin (de la Fuente, M. A. et al. (1997) Blood 90:2398-2405). Immunoprecipitations are performed using DITHP-specific antibodies, and immunoprecipitated samples are analyzed using SDS-PAGE and immunoblotting techniques. The ratio of labeled immunoprecipitant to unlabeled immunoprecipitant is proportional to the amount of DITHP expressed on the cell surface.

[0874] Alternatively, an assay for DITHP activity measures the amount of cell aggregation induced by overexpression of DITHP. In this assay, cultured cells such as NIH3T3 are transfected with cDNA encoding DITHP contained within a suitable mammalian expression vector under control of a strong promoter. Cotransfection with cDNA encoding a fluorescent marker protein, such as Green Fluorescent Protein (CLONTECH), is useful for identifying stable transfectants. The amount of cell agglutination, or clumping, associated with transfected cells is compared with that associated with untransfected cells. The amount of cell agglutination is a direct measure of DITHP activity.

[0875] DITHP may recognize and precipitate antigen from serum This activity can be measured by the quantitative precipitin reaction (Golub, E. S. et al. (1987) Immunology: A Synthesis, Sinauer Associates, Sunderland M A, pages 113-115). DITHP is isotopically labeled using methods known in the art. Various serum concentrations are added to constant amounts of labeled DITHP. DITHP-antigen complexes precipitate out of solution and are collected by centrifugation. The amount of precipitable DITHP-antigen complex is proportional to the amount of radioisotope detected in the precipitate. The amount of precipitable DITHP-antigen complex is plotted against the serum concentration. For various serum concentrations, a characteristic precipitation curve is obtained, in which the amount of precipitable DITHP-antigen complex initially increases proportionately with increasing serum concentration, peaks at the equivalence point, and then decreases proportionately with further increases in serum concentration. Thus, the amount of precipitable DITHP-antigen complex is a measure of DITHP activity which is characterized by sensitivity to both limiting and excess quantities of antigen.

[0876] A microtubule motility assay for DITHP measures motor protein activity. In this assay, recombinant DITHP is immobilized onto a glass slide or similar substrate. Taxol-stabilized bovine brain microtubules (commercially available) in a solution containing ATP and cytosolic extract are perfused onto the slide. Movement of microtubules as driven by DITHP motor activity can be visualized and quantified using video-enhanced light microscopy and image analysis techniques. DITHP motor protein activity is directly proportional to the frequency and velocity of microtubule movement.

[0877] Alternatively, an assay for DITHP measures the formation of protein filaments in vitro. A solution of DITHP at a concentration greater than the “critical concentration” for polymer assembly is applied to carbon-coated grids. Appropriate nucleation sites may be supplied in the solution. The grids are negative stained with 0.7% (w/v) aqueous uranyl acetate and examined by electron microscopy. The appearance of filaments of approximately 25 nm (microtubules), 8 nm (actin), or 10 nm (intermediate filaments) is a demonstration of protein activity.

[0878] DITHP electron transfer activity is demonstrated by oxidation or reduction of NADP. Substrates such as Asn-βGal, biocytidine, or ubiquinone-10 may be used. The reaction mixture contains 1-2 mg/ml HORP, 15 mM substrate, and 2.4 mM NAD(P)⁺in 0.1 M phosphate buffer, pH 7.1 (oxidation reaction), or 2.0 mM NAD(P)H, in 0.1 M Na₂HPO₄ buffer, pH 7.4 (reduction reaction); in a total volume of 0.1 ml. FAD may be included with NAD, according to methods well known in the art. Changes in absorbance are measured using a recording spectrophotometer. The amount of NAD(P)H is stoichiometrically equivalent to the amount of substrate initially present, and the change in A₃₄₀ is a direct measure of the amount of NAD(P)H produced; ΔA³⁴⁰⁼⁶⁶²⁰[NADH]. DITHP activity is proportional to the amount of NAD(P)H present in the assay. The increase in extinction coefficient of NAD(P)H coenzyme at 340 nm is a measure of oxidation activity, or the decrease in extinction coefficient of NAD(P)H coenzyme at 340 nm is a measure of reduction activity (Dalziel, K (1963) J. Biol. Chen 238:2850-2858).

[0879] DITHP transcription factor activity is measured by its ability to stimulate transcription of a reporter gene (Liu, H. Y. et al. (1997) EMBO J. 16:5289-5298). The assay entails the use of a well characterized reporter gene construct, LexAₒₚ-LacZ, that consists of LexA DNA transcriptional control elements (LexAₒₚ) fused to sequences encoding the E. coli Lac enzyme. The methods for constructing and expressing fusion genes, introducing them into cells, and measuring LacZ enzyme activity, are well known to those skilled in the art. Sequences encoding DITHP are cloned into a plasmid that directs the synthesis of a fusion protein, LexA-DITHP, consisting of DITHP and a DNA binding domain derived from the LexA transcription factor. The resulting plasmid, encoding a LexA-DITHP fusion protein, is introduced into yeast cells along with a plasmid containing the LexAₒₚ-LacZ reporter gene. The amount of LacZ enzyme activity associated with LexA-DITHP transfected cells, relative to control cells, is proportional to the amount of transcription stimulated by the DITHP.

[0880] Chromatin activity of DITHP is demonstrated by measuring sensitivity to DNase I (Dawson, B. A. et al. (1989) J. Biol. Chem. 264:12830-12837). Samples are treated with DNase 1, followed by insertion of a cleavable biotinylated nucleotide analog, 5-[(N-biotinamido)hexanoamido-ethyl-1,3-thiopropionyl-3-aminoallyl]-2′-deoxyuridine 5′-triphosphate using nick-repair techniques well known to those skilled in the art Following purification and digestion with EcoRI restriction endonuclease, biotinylated sequences are affinity isolated by sequential binding to streptavidin and biotincellulose.

[0881] Another specific assay demonstrates the ion conductance capacity of DITHP using an electrophysiological assay. DITHP is expressed by transforming a mammalian cell line such as COS7. HeLa or CHO with a eukaryotic expression vector encoding DITH. Eukaryotic expression vectors are commercially available, and the techniques to introduce them into cells are well known to those skilled in the art. A small amount of a second plasmid, which expresses any one of a number of marker genes such as β-galactosidase, is co-transformed into the cells in order to allow rapid identification of those cells which have taken up and expressed the foreign DNA The cells are incubated for 48-72 hours after transformation under conditions appropriate for the cell line to allow expression and accumulation of DITHP and β-galactosidase. Transformed cells expressing β-galactosidase are stained blue when a suitable colorimetric substrate is added to the culture media under conditions that are well known in the art. Stained cells are tested for differences in membrane conductance due to various ions by electrophysiological techniques that are well known in the art. Untransformed cells, and/or cells transformed with either vector sequences alone or β-galactosidase sequences alone, are used as controls and tested in parallel. The contribution of DITHP to cation or anion conductance can be shown by incubating the cells using antibodies specific for either DITHP. The respective antibodies will bind to the extracellular side of DITHP, thereby blocking the pore in the ion channel, and the associated conductance.

[0882] XV. Functional Assays

[0883] DITHP function is assessed by expressing dithp at physiologically elevated levels in mammalian cell culture systems. cDNA is subcloned into a mammalian expression vector containing a strong promoter that drives high levels of cDNA expression Vectors of choice include pCMV SPORT (Life Technologies) and pCR3.1 (Invitrogen Corporation, Carlsbad Calif.), both of which contain the cytomegalovirus promoter. 5-10 μg of recombinant vector are transiently transfected into a human cell line, preferably of endothelial or hematopoietic origin, using either liposome formulations or electroporation. 1-2 μg of an additional plasmid containing sequences encoding a marker protein are co-transfected.

[0884] Expression of a marker protein provides a means to distinguish transfected cells from nontransfected cells and is a reliable predictor of cDNA expression from the recombinant vector. Marker proteins of choice include, e.g., Green Fluorescent Protein (GFP; CLONTECH), CD64, or a CD64GFP fusion protein. Flow cytometry (FCM), an automated laser optics-based technique, is used to identity transfected cells expressing GFP or CD64-GFP and to evaluate the apoptotic state of the cells and other cellular properties.

[0885] FCM detects and quantifies the uptake of fluorescent molecules that diagnose events preceding or coincident with cell death. These events include changes in nuclear DNA content as measured by staining of DNA with propidium iodide; changes in cell size and granularity as measured by forward light scatter and 90 degree side light scatter; down-regulation of DNA synthesis as measured by decrease in bromodeoxyuridine uptake; alterations in expression of cell surface and intracellular proteins as measured by reactivity with specific antibodies; and alterations in plasma membrane, composition as measured by the binding of fluorescein-conjugated Annexin V protein to the cell surface. Methods in flow cytometry are discussed in Ormerod, M. G. (1994) Flow Cytometry, Oxford, New York N.Y.

[0886] The influence of DITHP on gene expression can be assessed using highly purified populations of cells transfected with sequences encoding DITHP and either CD64 or CD64GFP. CD64 and CD64GFP are expressed on the surface of transfected cells and bind to conserved regions of human immunoglobulin G (IgG). Transfected cells are efficiently separated from nontransfected cells using magnetic beads coated with either human IgG or antibody against CD64 (DYNAL, Inc., Lake Success N.Y.). mRNA can be purified from the cells using methods well known by those of skill in the art Expression of mRNA encoding DITHP and other genes of interest can be analyzed by northern analysis or microarray techniques.

[0887] XVI. Production of Antibodies

[0888] DITHP substantially purified using polyacrylamide gel electophoresis (PAGE; see, e.g., Harrington, M. G. (1990) Methods Enzymol. 182:488-495), or other purification techniques, is used to immunize rabbits and to produce antibodies using standard protocols.

[0889] Alternatively, the DITHP amino acid sequence is analyzed using LASERGENE software (DNASTAR) to determine regions of high immunogenicity, and a corresponding peptide is synthesized and used to raise antibodies by means known to those of skill in the art Methods for selection of appropriate epitopes, such as those near the C-terminus or in hydrophilic regions are well described in the art. (See, e.g., Ausubel, 1995, supra, Chapter 11.) Typically, peptides 15 residues in length are synthesized using an ABI 431A peptide synthesizer (Applied Biosystems) using fmoc-chemistry and coupled to KLH (Sigma) by reaction with N-maleimidobenzoyl-N-hydroxysuccinimide ester (MBS) to increase immunogenicity. (See, e.g., Ausubel, supra.) Rabbits are immunized with the peptide-KLH complex in complete Freund's adjuvant Resulting antisera are tested for antipeptide activity by, for example, binding the peptide to plastic, blocking with 1% BSA, reacting with rabbit antisera, washing, and reacting with radio-iodinated goat anti-rabbit IgG. Antisera with antipeptide activity are tested for anti-DITHP activity using protocols well known in the art, including ELISA, RIA, and immunoblotting.

[0890] XVII. Purification of Naturally Occurring DITHP Using Specific Antibodies

[0891] Naturally occurring or recombinant DITHP is substantially purified by immunoaffinity chromatography using antibodies specific for DITHP. An immunoaffinity column is constructed by covalently coupling anti-DITHP antibody to an activated chromatographic resin, such as CNBr-activated SEPHAROSE (Amersham Pharmacia Biotech). After the coupling, the resin is blocked and washed according to the manufacturer's instructions.

[0892] Media containing DITHP are passed over the immunoaffinity column, and the column is washed under conditions that allow the preferential absorbance of DITHP (e.g., high ionic strength buffers in the presence of detergent). The column is eluted under conditions that disrupt antibody/DITHP binding (e.g., a buffer of pH 2 to pH 3, or a high concentration of a chaotrope, such as urea or thiocyanate ion), and DITHP is collected.

[0893] XVIII. Identification of Molecules Which Interact with DITHP

[0894] DITHP, or biologically active fragments thereof, are labeled with ¹²⁵I Bolton-Hunter reagent (See, e.g., Bolton, A. E. and W. M. Hunter (1973) Biochem. J. 133:529-539.) Candidate molecules previously arrayed in the wells of a multi-well plate are incubated with the labeled DITHP, washed, and any wells with labeled DITHP complex are assayed Data obtained using different concentrations of DITHP are used to calculate values for the number, affinity, and association of DITHP with the candidate molecules.

[0895] Alternatively, molecules interacting with DITHP are analyzed using the yeast two-hybrid system as described in Fields, S. and O. Song (1989) Nature 340:245-246, or using commercially available kits based on the two-hybrid system, such as the MATCHMAKER system (CLONTECH).

[0896] DITHP may also be used in the PATHCALLING process (CuraGen Corp., New Haven Conn.) which employs the yeast two-hybrid system in a high-throughput manner to determine all interactions between the proteins encoded by two large libraries of genes (Nandabalan, K et al. (2000) U.S. Pat. No. 6,057,101).

[0897] All publications and patents mentioned in the above specification are herein incorporated by reference. Various modifications and variations of the described method and system of the invention will be apparent to those skilled in the art without departing from the scope and spirit of the invention. Although the invention has been described in connection with specific preferred embodiments, it should be understood that the invention as claimed should not be unduly limited to such specific embodiments. Indeed, various modifications of the above-described modes for carrying out the invention which are obvious to those skilled in the field of molecular biology or related fields are intended to be within the scope of the following claims.

TABLE 1

| SEQ | | GI | | |
|---|---|---|---|---|
| ID NO: | Template ID | Number | Probability Score | Annotation |
| 1 | LG:1040582.1:2000FEB18 | g178480 | 1.00E−92 | Human aldehyde reductase mRNA, complete cds. |
| 2 | LG:453570.1:2000FEB18 | g2909424 | 2.40E−65 | Glyoxalase I |
| 3 | LG:408751.3:2000FEB18 | g3608122 | 4.40E−74 | dihydropyrimidinase |
| 4 | LI:090574.1:2000FEB01 | g29600 | 5.00E−85 | carbonic anhydrase I (AA 1-261) |
| 5 | LI:229932.2:2000FEB01 | g1835116 | 2.00E−63 | acetyl-CoA synthetase |
| 6 | LI:332176.1:2000FEB01 | g2104689 | 0 | alpha glucosidase II, alpha subunit |
| 7 | LI:403248.2:2000FEB01 | g63713 | 4.00E−23 | ornithine decarboxylase |
| 8 | LG:220992.1:2000MAY19 | g10435462 | 0 | unnamed protein product (Homo sapiens) |
| 9 | LG:1094571.1:2000MAY19 | g7023634 | 4.00E−92 | unnamed protein product (Homo sapiens) |
| 10 | LI:350754.4:2000MAY01 | g307504 | 0 | transglutaminase E3 (Homo sapiens) |
| 11 | LI:255828.29:2000MAY01 | g189998 | 9.00E−65 | M2-type pyruvate kinase (Homo sapiens) |
| 12 | LI:1190263.1:2000MAY01 | g2576305 | 1.00E−172 | arylsulphatase (Homo sapiens) |
| 13 | LG:270916.2:2000FEB18 | g2088668 | 1.20E−11 | similar to Achlya amblsexualis antheridiol steroid receptor (NID:g166306) |
| 14 | LG:999414.3:2000FEB18 | g3861482 | 0 | Human chromosome 3, olfactory receptor pseudogene cluster 1, |
| | | | | complete sequence, and myosin light chain kinase (MLCK) |
| | | | | pseudogene, partial sequence. |
| 15 | LG:429446.1:2000FEB18 | g2358042 | 0 | Human T-cell receptor alpha delta locus from bases 501613 to 752736 |
| | | | | (section 3 of 5) of the Complete Nucleotide Sequence. |
| 16 | LI:057229.1:2000FEB01 | g10439739 | 2.00E−19 | unnamed protein product (Homo sapiens) |
| 17 | LI:351965.1:2000FEB01 | g2358042 | 0 | Human T-cell receptor alpha delta locus from bases 501613 to 752736 |
| | | | | (section 3 of 5) of the Complete Nucleotlde Sequence. |
| 18 | LG:068682.1:2000FEB18 | g404634 | 1.10E−31 | serine/threonine kinase |
| 19 | LG:242665.1:2000FEB18 | g2117166 | 1.00E−160 | Ras like GTPase (Homo sapiens) |
| 20 | LG:241743.1:2000FEB18 | g5763838 | 9.70E−49 | dJ593C16.1 (ras GTPase activating protein) |
| 21 | LI:034212.1:2000FEB01 | g1469876 | 0 | The KIAA0147 gene product is related to adenylyl cyclase. |
| 22 | LG:344886.1:2000MAY19 | g7008402 | 2.00E−89 | kappa B-ras 1 (Homo sapiens) |
| 23 | LG:228930.1:2000MAY19 | g206218 | 4.50E−87 | phospholipase C-1 |
| 24 | LG:338927.1:2000MAY19 | g3599940 | 3.00E−57 | faclogenital dysplasia protein 2 (Mus musculus) |
| 25 | LG:898771.1:2000MAY19 | g508528 | 5.00E−58 | myocyte nuclear factor (Mus musculus) |
| 26 | LI:257664.67:2000MAY01 | g183399 | 1.00E−142 | Human guanine nucleotide-binding protein alpha-subunit gene (G-s- |
| | | | | alpha), exon 3. |
| 27 | LI:001496.2:2000MAY01 | g3005085 | 1.00E−177 | hook1 protein (Homo sapiens) |
| 28 | LI:1085273.2:2000MAY01 | g1781037 | 0 | neuronal tyrosine threonine phosphatase 1 (Mus musculus) |
| 29 | LI:333138.2:2000MAY01 | g2077934 | 1.00E−164 | Protein Kinase (Rattus norvegicus) |
| 30 | LI:338927.1:2000MAY01 | g3599940 | 6.00E−45 | faciogenital dysplasia protein 2 (Mus musculus) |
| 31 | LG:335558.1:2000FEB18 | g1181619 | 5.00E−97 | a variant of TSC-22 (Gallus gallus) |
| 32 | LG:998283.7:2000FEB18 | g6683492 | 1.00E−105 | bromodomain PHD finger transcription factor (Homo sapiens) |
| 33 | LI:402739.1:2000FEB01 | g4164151 | 6.00E−34 | AhR repressor |
| 34 | LI:175223.1:2000FEB01 | g2745892 | 2.00E−11 | Y box transcription factor |
| | | | | supported by Genscan and several ESTs: C83049 (NID:g3062006), |
| | | | | AA823760 (NID:g2893628), AA215791 (NID:g1815572), AI095488 |
| 35 | LG:981076.2:2000MAY19 | g3924670 | 1.00E−59 | (NID:a3434464), and AA969095 (NID:a3144275) (Homo sapiens) |
| 36 | LI:1008973.1:2000MAY01 | g6939732 | 2.00E−52 | transcription factor Elongin A2 (Homo sapiens) |
| 37 | LI:1190250.1:2000MAY01 | g3757892 | 4.00E−66 | enhancer of polycomb (Mus musculus) |
| 38 | LG:021371.3:2000FEB18 | g984814 | 1.40E−60 | zinc finger protein |
| 39 | LG:475404.1:2000FEB18 | g487784 | 5.00E−36 | Human zinc finger protein ZNF136. |
| 40 | LG:979406.2:2000FEB18 | g4325310 | 3.60E−1 1 | zinc-finger protein 7 |
| 41 | LG:410726.1:2000FEB1B | g6002480 | 2.60E−39 | BWSCR2 associated zinc-finger protein BAZ2 |
| 42 | LG:200005.1:2000FEB18 | g1504006 | 3.20E−25 | similarto human ZFY protein. |
| 43 | LG:1076828.1:2000FEB18 | g498720 | 2.00E−33 | Human HZF10 mRNA for zinc finger protein. |
| 44 | LG:1076931.1:2000FEB18 | g498151 | 2.00E−52 | Human mRNA for KIAA0065 gene, partial cds. |
| 45 | LG:1078121.1:2000FEB18 | g186773 | 2.00E−47 | Human Kruppel related zinc finger protein (HTF10) mRNA, complete cds. |
| 46 | LG:1079203.1:2000FEB18 | g1017721 | 0 | Human repressor transcriptional factor (ZNF85) mRNA, complete cds. |
| 47 | LG:1082586.1:2000FEB18 | g7959207 | 1.00E−19 | KIAA1473 protein (Homo sapiens) |
| 48 | LG:1082774.1:2000FEB18 | g184451 | 0 | Human Krueppel-related DNA-binding protein (TF9 PF4) mRNA, 5′ cds. |
| 49 | LG:1082775.1:2000FEB18 | g506502 | 3.50E−36 | NK10 |
| 50 | LG:1083120.1:2000FEB18 | g7023216 | 1.00E−14 | unnamed protein product (Homo sapiens) |
| 51 | LG:1087707.1:2000FEB18 | g347905 | 2.00E−40 | Human zinc finger protein (ZNF141) mRNA, complete cds. |
| 52 | LG:1090915.1:2000FEB18 | g347905 | 2.00E−24 | Human zinc finger protein (ZNF141) mRNA, complete cds. |
| 53 | LG:1094230.1:2000FEB18 | g454818 | 1.00E−98 | Human Krueppel-related DNA-binding protein (PF4) mRNA, 5′ end. |
| 54 | LG:474848.3:2000FEB18 | g498152 | 4.00E−16 | ha0946 protein is Kruppel-related. |
| 55 | LI:251656.1:2000FEB01 | g55471 | 0 | Zfp-29 |
| 56 | LI:021371.1:2000FEB01 | g984814 | 2.00E−96 | zinc finger protein |
| 57 | LI:133095.1:2000FEB01 | g453376 | 8.00E−42 | zinc finger protein PZF |
| 58 | LI:236654.2:2000FEB01 | g498721 | 2.00E−22 | zinc finger protein |
| 59 | LI:200009.1:2000FEB01 | g498719 | 4.00E−24 | zinc finger protein |
| 60 | LI:758502.1:2000FEB01 | g200407 | 0 | pMLZ-4 |
| 61 | LI:344772.1:2000FEB01 | g4062983 | 3.00E−67 | Eos protein |
| 62 | LI:789445.1:2000FEB01 | g1049301 | 2.00E−26 | KRAB zinc finger protein; Method:conceptual translation supplied by |
| 63 | LI:789657.1:2000FEB01 | g1020145 | 1.00E−53 | DNA binding protein |
| 64 | LI:789808.1:2000FEB01 | g288424 | 0 | Human ZNF37A mRNA for zinc finger protein. |
| 65 | LI:792919.1:2000FEB01 | g2232012 | 0 | Human zinc finger protein (FDZF2) mRNA, complete cds. |
| 66 | LI:793949.1:2000FEB01 | g1017721 | 3.00E−53 | Human repressor transcriptional factor (ZNF85) mRNA, complete cds. |
| 67 | LI:794389.1:2000FEB01 | g5640017 | 4.00E−45 | zinc finger protein ZFP113 |
| 68 | LI:796010.1:2000FEB01 | g288424 | 0 | Human ZNF37A mRNA for zinc finger protein. |
| 69 | LI:796324.1:2000FEB01 | g288424 | 0 | Human ZNF37A mRNA for zinc finger protein. |
| 70 | LI:796373.1:2000FEB01 | g1020145 | 9.00E−36 | DNA binding protein |
| 71 | LI:796415.1:2000FEB01 | g498151 | 4.00E−28 | Human mRNA for KIAA0065gene, partial cds. |
| 72 | LI:798636.1:2000FEB01 | g2970037 | 0 | Human HKL1 mRNA, complete cds. |
| 73 | LI:800045.1:2000FEB01 | g538413 | 2.00E−55 | zinc finger protein |
| 74 | LI:800680.1:2000FEB01 | g7023216 | 7.00E−18 | unnamed protein product (Homo sapiens) |
| 75 | LI:800894.1:2000FEB01 | g3342001 | 0 | Human hematopoietic cell derived zinc finger protein mRNA, complete |
| 76 | LI:801015.1:2000FEB01 | g487785 | 4.00E−16 | zinc finger protein ZNF136 (Homo sapiens) |
| 77 | LI:801236.1:2000FEB01 | g488555 | 4.00E−48 | zinc finger protein ZNF135 |
| 78 | LI:803335.1:2000FEB01 | g498152 | 1.00E−20 | ha0946 protein is Kruppel-related. |
| 79 | U:803998.1:2000FEB01 | g1017722 | 1.00E−53 | repressor transcriptional factor |
| 80 | LI:478757.1:2000FEB01 | g498151 | 9.00E−27 | Human mRNA for KIAA0065 gene, partial cds. |
| 81 | LI:808532.1:2000FEB01 | g2232012 | 0 | Human zinc finger protein (FDZF2) mRNA, complete cds. |
| 82 | LI:443073.1:2000FEB01 | g4567179 | 3.00E−33 | BC37295_1 (Homo sapiens) |
| 83 | LI:479671.1:2000FEB01 | g487784 | 3.00E−38 | Human zinc finger protein ZNF136. |
| 84 | LI:810078.1:2000FEB01 | g498718 | 0 | Human HZF1 mRNA for zinc finger protein. |
| 85 | LI:810224.1:2000FEB01 | g288424 | 0 | Human ZNF37A mRNA for zinc finger protein. |
| 86 | LI:817052.2:2000FEB01 | g1020145 | 1.00E−51 | DNA binding protein |
| 87 | LG:892274.1:2000MAY19 | g6650686 | 2.00E−95 | Human Y-linked zinc finger protein (ZFY) gene, complete cds. |
| 88 | LG:1080959.1:2000MAY19 | g5262560 | 2.00E−40 | hypothetical protein (Homo sapiens) |
| 89 | LG:1054900.1:2000MAY19 | g5262560 | 3.00E−35 | hypothetical protein (Homo sapiens) |
| 90 | LG:1077357.1:2000MAY19 | g10047297 | 2.00E−23 | KIAA1611 protein (Homo sapiens) |
| 91 | LG:1084051.1:2000MAY19 | g5931821 | 8.00E−79 | dJ228H13.3 (zinc finger protein) (Homo sapiens) |
| 92 | LG:1076853.1:2000MAY19 | g506502 | 1.00E−141 | NK10 (Mus musculus) |
| 93 | LG:481631.10:2000MAY19 | g7023216 | 1.00E−142 | unnamed protein product (Homo sapiens) |
| 94 | LG:1088431.2:2000MAY19 | g7023216 | 7.00E−18 | unnamed protein product (Homo sapiens) |
| 95 | LI:401619.10:2000MAY01 | g7959865 | 1.00E−18 | PRO2032 (Homo sapiens) |
| 96 | LI:1144007.1:2000MAY01 | g5360097 | 0 | putative kruppel-related zinc finger protein NY-REN-23 antigen (Homo |
| | | | | sapiens) |
| 97 | LI:331074.1:2000MAY01 | g2149792 | 0 | Roaz (Rattus norvegicus) |
| 98 | LI:1170349.1:2000MAY01 | g487787 | 1.00E−45 | zinc finger protein ZNF140 (Homo sapiens) |
| 99 | LG:335097.1:2000FEB18 | g7020440 | 6.00E−25 | unnamed protein product (Homo sapiens) |
| 100 | LG:1076451.1:2000FEB18 | g2088550 | 0 | Human hereditary haemochromatosis region, histone 2A-like protein |
| | | | | gene, hereditary haemochromatosis (HLA-H) gene, RoRet gene, and |
| | | | | sodium phosphate transporter (NPT3) gene, complete cds. |
| 101 | LI:805478.1:2000FEB01 | g2088550 | 0 | Human hereditary haemochromatosis region, histone 2A-like protein |
| | | | | gene, hereditary haemochromatosis (HLA-H) gene, RoRet gene, and |
| | | | | sodium phosphate transporter (NPT3) gene. complete cds. |
| 102 | LG:101269.1:2000MAY19 | g3953533 | 2.10E−56 | inwardly rectifying potassium channel Klr5.1 |
| 103 | LI:331087.1:2000MAY01 | g4186073 | 3.00E−41 | calcium channel alpha-2-delta-C subunit (Mus musculus) |
| 104 | LI:410188.1:2000MAY01 | g4836145 | 0 | tetrodotoxin-resistant voltage-gated sodium channel (Homo sapiens) |
| 105 | LI:1188288.1:2000MAY01 | g204220 | 0 | beta-alanine-sensitive neuronal GABA transporter (Rattus norvegicus) |
| 106 | LI:427997.4:2000MAY01 | g6996442 | 1.00E−48 | CTL1 protein (Homo sapiens) |
| 107 | LG:451682.1:2000FEB18 | g5091520 | 3.00E−75 | ESTs AU058081 (E30812), AU058365(E50679), AU030138(E50679) |
| | | | | oleracea mRNA for proteasome 37 kD subunit.(X96974) |
| 108 | LG:1077283.1:2000FEB18 | g2565302 | 0 | Rhesus monkey cyclophilin A mRNA, complete cds. |
| 109 | LG: 481436.5:2000FEB18 | g3873707 | 2.60E−34 | Similarity to B. subtilis DNAJ protein (SW: DNAJ_BACSU); cDNA EST |
| | | | | yk437a1.5 comes from this gene |
| 110 | LI:793701.1:2000FEB01 | g1049231 | 4.00E−33 | Method: conceptual translation supplied by author; putative hybrid |
| | | | | protein similar to HERV-H protease and HERV-E integrase (Human |
| | | | | endogenous retrovirus) |
| 111 | LI:373637.1:2000FEB01 | g2286123 | 3.00E−50 | testis specific DNAj-homolog |
| 112 | LG:239368.2:2000MAY19 | g4981382 | 1.00E−11 | dnaJ protein (Thermotoga maritima) |
| 113 | LI:053826.1:2000MAY01 | g2943716 | 4.00E−67 | 25 kDa trypsin inhibitor (Homo sapiens) |
| 114 | LI:449393.1:2000MAY01 | g6957716 | 1.00E−128 | putative chaperonin (Arabidopsis thaliana) |
| 115 | LI:1071427.96:2000MAY01 | g9956070 | 1.00E−144 | similar to Homo sapiens mRNA for KIAA0723 protein with GenBank |
| | | | | Accession Number AB018266.10 |
| 116 | LI:336338.8:2000MAY01 | g9296929 | 2.00E−16 | protease PC6 isoform A (Homo sapiens) |
| 117 | LG:345527.1:2000FEB18 | g805296 | 3.40E−176 | lymphocyte specific helicase |
| 118 | LG:1089383.1:2000FEB18 | g2104910 | 3.00E−23 | ORF derived from D1 leader region and integrase coding region (Homo |
| | | | | sapiens) |
| 119 | LG:1092522.1:2000FEB18 | g1263080 | 0 | Human mariner1 transposase gene, complete consensus sequence. |
| 120 | LG:1093216.1:2000FEB18 | g2104910 | 1.00E−23 | ORF derived from D1 leader region and integrase coding region (Homo |
| | | | | sapiens) |
| 121 | LI:270318.3:2000FEB01 | g3880433 | 3.00E−12 | similar to mitochondrial RNA splicing MSR4 like protein; cDNA EST |
| | | | | EMBL: C09217 comes from this gene |
| 122 | LI:335671.2:2000FEB01 | g805296 | 1.00E−83 | lymphocyte specific helicase |
| 123 | LI:793758.1:2000FEB01 | g2104910 | 4.00E−26 | ORF derived from D1 leader region and integrase coding region (Homo |
| | | | | sapiens) |
| 124 | LI:803718.1:2000FEB01 | g2104910 | 3.00E−23 | ORF derived from D1 leader region and integrase coding region (Homo |
| | | | | sapiens) |
| 125 | LI:412179.1:2000FEB01 | g1263080 | 4.00E−93 | Human mariner1 transposase gene, complete consensus sequence. |
| 126 | LI:815679.1:2000FEB01 | g7020440 | 3.00E−12 | unnamed protein product (Homo sapiens) |
| 127 | LI:481361.3:2000FEB01 | g3776011 | 5.00E−25 | RNA helicase |
| 128 | LG:247388.1:2000MAY19 | g6016932 | 3.00E−127 | dJ620E11.1a (novel Helicase C-terminal domain and SNF2 N-terminal |
| | | | | domains containing protein, similar to KIAA0308) |
| 129 | LG:255789.10:2000MAY19 | g37542 | 2.00E−57 | Human mRNA for U1 small nuclear RNP-specific C protein. |
| 130 | LI:787618.1:2000MAY01 | g7020440 | 3.00E−12 | unnamed protein product (Homo sapiens) |
| 131 | LI:331610.2:2000MAY01 | g2599502 | 0 | protocadherin 68 (Homo sapiens) |
| 132 | LG:982697.1:2000FEB18 | g10436424 | 1.00E−25 | unnamed protein product (Homo sapiens) |
| 133 | LG:1080896.1:2000FEB18 | g5926696 | 0 | Human genomic DNA, chromosome 6p21.3, HLA Class I region, section |
| | | | | 8/20. |
| 134 | LI:811341.1:2000FEB01 | g5926696 | 0 | Human genomic DNA, chromosome 6p21.3, HLA Class I region, section |
| | | | | 8/20. |
| 135 | LI:903225.1:2000FEB01 | g5926710 | 0 | Human genomic DNA, chromosome 6p21.3, HLA Class I region, section |
| | | | | 20/20. |
| 136 | LI:242079.2:2000FEB01 | g5926703 | 0 | Human genomic DNA, chromosome 6p21.3, HLA Class I region, section |
| | | | | 15/20. |
| 137 | LG:979580.1:2000MAY19 | g9280152 | 7.00E−23 | unnamed portein product (Macaca fascicularis) |
| 138 | LI:1169865.1:2000MAY01 | g673417 | 1.00E−112 | class II antigen (Homo sapiens) |
| 139 | LG:337818.2:2000FEB18 | g404777 | 4.80E−84 | cytochrome P-450 2B-Bx |
| 140 | LI:337818.1:2000FEB01 | g203759 | 4.00E−58 | cytochrome P-450(1) |
| 141 | LG:241577.4:2000MAY19 | g2809498 | 1.50E−29 | cytochrome c oxidase subunit IV |
| 142 | LG:344786.4:2000MAY19 | g164981 | 2.00E−06 | cytochrome P-450p-2 (Oryctolagus cuniculus) |
| 143 | LI:414307.1:2000FEB01 | g30095 | 9.00E−48 | collagen subunit (alpha-1 (X)) 3 |
| 144 | LI:202943.2:2000FEB01 | g391663 | 7.00E−06 | hikaru genki type 1 product |
| 145 | LI:246194.2:2000FEB01 | g1405821 | 1.00E−05 | SULFATED SURFACE GLYCOPROTEIN 185 |
| 146 | LI:815961.1:2000FEB01 | g292045 | 0 | Human mucin mRNA, partial cds. |
| 147 | LG:120744.1:2000MAY19 | g4582324 | 1.00E−168 | dJ708F5.1 (PUTATIVE novel Collagen alpha 1 LIKE protein) (Homo |
| 148 | LI:757520.1:2000MAY01 | g7161771 | 0 | keratin (Homo sapiens) |
| 149 | LG:160570.1:2000FEB18 | g466548 | 1.00E−46 | NBL4 |
| 150 | LI:350398.3:2000FEB01 | g3724141 | 1.00E−06 | myosin I |
| 151 | LI:221285.1:2000FEB01 | g18218 | 2.00E−74 | spoke protein |
| 152 | LI:401605.2:2000FEB01 | g1755049 | 1.00E−15 | myosin X |
| 153 | LI:329017.1:2000FEB01 | g1813638 | 2.00E−51 | PF20 |
| 154 | LI:401322.1:2000FEB01 | g38076 | 2.00E−30 | Macaque mRNA for alpha-tubulin. |
| 155 | LG:403409.1:2000MAY19 | g7303061 | 0 | Khc-73 gene product (Drosophila melanogaster) |
| 156 | LG:233933.5:2000MAY19 | g7385113 | 2.00E−18 | ankyrin 1 (Bos taurus) |
| 157 | LI:290344.1:2000MAY01 | g1353782 | 0 | dystrophin-related protein 2 (Homo sapiens) |
| 158 | LI:410742.1:2000MAY01 | g2290200 | 0 | desmoglein 3 (Mus musculus) |
| 159 | LG:406568.1:2000MAY19 | g28969 | 5.30E−44 | 64 Kd autoantigen |
| 160 | LI:283762.1:2000MAY01 | g1469868 | 0 | The KIAA0143 gene product is related to a putative C. elegans gene |
| | | | | encoded on cosmid C32D5. (Homo sapiens) |
| 161 | LI:347687.113:2000MAY01 | g387514 | 1.00E−123 | DM-20 protein (Mus musculus) |
| 162 | LI:1146510.1:2000MAY01 | g2149291 | 3.00E−24 | defender against death 1 protein (Homo sapiens) |
| 163 | LG:451710.1:2000FEB18 | g5816996 | 2.40E−42 | ribosomal protein L32-like protein |
| 164 | LG:455771.1:2000FEB18 | g643074 | 1.70E−59 | putative 40S ribosomal protein s12 |
| 165 | LG:452089.1:2000FEB18 | g463252 | 1.90E−62 | RL5 ribosomal protein |
| 166 | LG:246415.1:2000FEB18 | g296451 | 0 | Human mRNA for ribosomal protein S26. |
| 167 | LG:414144.10:2000FEB18 | g200785 | 1.80E−16 | ribosomal protein L7 |
| 168 | LG:1101445.1:2000FEB18 | g1800114 | 0 | Human ribosomal protein L7 antisense mRNA gene, partial sequence. |
| 169 | LG:452134.1:2000FEB18 | g550024 | 0 | Human ribosomal protein S10 mRNA, complete cds. |
| 170 | LI:903021.1:2000FEB01 | g36139 | 0 | Human mRNA for ribosomal protein L7. |
| 171 | LI:246422.1:2000FEB01 | g409069 | 0 | Human mRNA for HBp15/L22, complete cds. |
| 172 | LG:449404.1:2000MAY19 | g4886269 | 5.00E−66 | putative ribosomal protein S14 (Arabidopsis thaliana) |
| 173 | LG:449413.1:2000MAY19 | g643074 | 1.00E−70 | putative 40S ribosomal protein s12 (Fragaria x ananassa) |
| 174 | LG:450105.1:2000MAY19 | g643074 | 6.00E−76 | putative 40S ribosomal protein s12 (Fragaria x ananassa) |
| 175 | LG:460809.1:2000MAY19 | g36129 | 4.00E−54 | Human mRNA for ribosomal protein L31. |
| 176 | LG:481781.1:2000MAY19 | g2331301 | 1.00E−130 | ribosomal protein S4 type I (Zea mays) |
| 177 | LG:1101153.1:2000MAY19 | g2668748 | 2.00E−95 | ribosomal protein L17 (Zea mays) |
| 178 | LI:257695.20:2000MAY01 | g57714 | 1.00E−62 | ribosomal protein S16 (AA 1-146) (Rattus rattus) |
| 179 | LI:455771.1:2000MAY01 | g643074 | 6.00E−76 | putative 40S ribosomal protein s12 (Fragaria x ananassa) |
| 180 | LI:274551.1:2000MAY01 | g36145 | 2.00E−59 | Human mRNA for ribosomal protein S12. |
| 181 | LI:035973.1:2000MAY01 | g57121 | 8.00E−29 | ribosomal protein L37 (Rattus norvegicus) |
| 182 | LG:978427.5:2000FEB18 | g545998 | 2.50E−67 | tricarboxylate carrier (rats, liver, Peptide Mitochondrial Partial, 357 aa) |
| 183 | LG:247781.2:2000FEB18 | g2352427 | 9.40E−29 | peroxisomal Ca-dependent solute carrier |
| 184 | LI:034583.1:2000FEB01 | g5815141 | 0 | nuclear body associated kinase 1b |
| 185 | LI:333307.2:2000FEB01 | g295671 | 0.0003 | selected as a weak suppressor of a mutant of the subunit AC40 of DNA |
| | | | | dependant RNA polymerase I and III |
| 186 | LI:814710.2:2000FEB01 | g178281 | 1.00E−46 | AHNAK nucleoprotein |
| 187 | LG:414732.1:2000MAY19 | g183233 | 2.00E−54 | beta-glucuronidase precursor (EC 3.2.1.31) |
| 188 | LG:413910.6:2000MAY19 | g7022046 | 1.00E−109 | unnamed protein product (Homo sapiens) |
| 189 | LI:414732.2:2000MAY01 | g183232 | 0 | Human beta-glucuronidase mRNA, complete cds. |
| 190 | LI:900264.2:2000MAY01 | g414797 | 2.00E−81 | pyruvate dehydrogenase phosphatase (Bos taurus) |
| 191 | LI:335593.1:2000MAY01 | g3851553 | 5.00E−34 | RNA-binding protein Nova-2 (Homo sapiens) |
| 192 | LI:1189543.1:2000MAY01 | g7025507 | 0 | ventral neuron-specific protein 1 NOVA1 (Mus musculus) |
| 193 | LG:455450.1:2000FEB18 | g4105111 | 2.10E−20 | dehydrin 6 |
| 194 | LG:1040978.1:2000FEB18 | g453189 | 3.30E−41 | acyl carrier protein |
| 195 | LG:446649.1:2000FEB18 | g181960 | 2.00E−35 | Human endozepine (putative ligand of benzodiazepine receptor) |
| | | | | mRNA, complete cds. |
| 196 | LG:132147.3:2000FEB18 | g6446606 | 0 | E3 ubiquitin ligase SMURF1 (Homo sapiens) |
| 197 | LI:036034.1:2000FEB01 | g9622856 | 1.00E−33 | sorting nexin 15A (Homo sapiens) |
| 198 | LG:162161.1:2000MAY19 | g5823961 | 3.00E−87 | dJ20B11.1 (ortholog of rat RSEC5 (mammalian exocyst complex subunit)) |
| | | | | (Homo sapiens) |
| 199 | LG:407214.10:2000MAY19 | g9963839 | 4.00E−54 | lipase (Homo sapiens) |
| 200 | LG:204626.1:2000MAY19 | g3243240 | 5.10E−41 | syntaxin 11 |
| 201 | LI:007401.1:2000MAY01 | g4512103 | 3.00E−81 | rab 11 binding protein (Bos taurus) |
| 202 | LI:476342.1:2000MAY01 | g790641 | 2.00E−21 | gamma-thionin (Hordeum vulgare) |
| 203 | LI:1072759.1:2000MAY01 | g2367625 | 4.00E−21 | protein synthesis elongation factor 1-alpha (Rhodotorula mucilaginosa) |
| 204 | LG:998857.1:2000FEB18 | g2731641 | 6.10E−13 | Fas-ligand associated factor 3 |
| 205 | LG:482261.1:2000FEB18 | g4003386 | 0 | Human genomic DNA of 8p21.3-p22 anti-oncogene of hepatocellular |
| | | | | colorectal and non-small cell lung cancer, segment 9/11. |
| 206 | LG:480328.1:2000FEB18 | g246482 | 0 | prohibitin (Human, mRNA, 1043 nt). |
| 207 | LG:311197.1:2000MAY19 | g505033 | 8.00E−62 | mitogen inducible gene mig-2 (Homo sapiens) |
| 208 | LG:1054883.1:2000MAY19 | g325464 | 0 | Human endogenous retrovirus type C oncovirus sequence. |
| 209 | LG:399395.1:2000MAY19 | g1177607 | 8.00E−10 | pva1 (Plasmodium vivax) |
| 210 | LG:380497.2:2000MAY19 | g10504238 | 3.00E−88 | hepatocellular carcinoma-related putative tumor suppressor (Homo |
| 211 | LI:272913.22:2000MAY01 | g4982485 | 3.00E−59 | apoptosis related protein APR-3 (Homo sapiens) |

[0898] TABLE 2

| SEQ ID NO: | Template ID | Start | Stop | Frame | Pfam Hit | Pfam Description | E-value |
|---|---|---|---|---|---|---|---|
| 1 | LG:1040582.1:2000FEB18 | 267 | 539 | forward 3 | aldo_ket_red | Aldo/keto reductase family | 2.50E−51 |
| 2 | LG:453570.1:2000FEB18 | 186 | 605 | forward 3 | Glyoxalase | Glyoxalase | 3.80E−72 |
| 3 | LG:408751.3:2000FEB18 | 194 | 1345 | forward 2 | Dihydrooratase | Dihydroorotase-like | 1.40E−19 |
| 4 | LI:090574.1:2000FEB01 | 60 | 776 | forward 3 | carb_anhydrase | Eukaryotic-type carbonic anhydrase | 9.70E−144 |
| 6 | LI:332176.1:2000FEB01 | 2 | 961 | forward 2 | Glyco_hydro_31 | Glycosyl hydrolases family 31 | 4.10E−144 |
| 7 | LI:403248.2:2000FEB01 | 191 | 367 | forward 2 | Orn_DAP_Arg_deC | Pyrldoxal-dependent decarboxylase | 1.40E−12 |
| 8 | LG:220992.1:2000MAY19 | 156 | 1556 | forward 3 | Amidase | Amidase | 1.10E−153 |
| 9 | LG:1094571.1:2000MAY19 | 328 | 720 | forward 1 | FAD_Synth | Riboflavin kinase/FAD synthetase | 2.30E−42 |
| 10 | LI:350754.4:2000MAY01 | 855 | 1121 | forward 3 | Transglut_core | Transglutaminase-like superfamily | 2.90E−47 |
| 10 | LI:350754.4:2000MAY01 | 1455 | 2132 | forward 3 | Transglutamin_C | Transglutaminase family | 3.20E−106 |
| 10 | LI:350754.4:2000MAY01 | 54 | 413 | forward 3 | Transglutamin_N | Transglutaminase family | 2.50E−63 |
| 11 | LI:255828.29:2000MAY01 | 2 | 367 | forward 2 | PK | Pyruvate kinase | 7.00E−71 |
| 11 | LI:255828.29:2000MAY01 | 348 | 512 | forward 3 | PK | Pyruvate kinase | 5.70E−24 |
| 12 | LI:1190263.1:2000MAY01 | 281 | 1750 | forward 2 | Sulfatase | Sulfatase | 8.60E−66 |
| 14 | LG:999414.3:2000FEB18 | 718 | 1038 | forward 1 | 7tm_1 | 7 transmembrane receptor | 3.60E−13 |
| | | | | | | (rhodopsin family) | |
| 14 | LG:999414.3:2000FEB18 | 1115 | 1453 | forward 2 | 7tm_1 | 7 transmembrane receptor | 4.30E−07 |
| | | | | | | (rhodopsin family) | |
| 18 | LG:068682.1:2000FEB18 | 176 | 883 | forward 2 | pkinase | Eukaryotic protein kinase domain | 1.70E−65 |
| 19 | LG:242665.1:2000FEB18 | 190 | 747 | forward 1 | ras | Ras family | 2.30E−34 |
| 20 | LG:241743.1:2000FEB18 | 199 | 345 | forward 1 | PH | PH domain | 8.00E−06 |
| 22 | LG:344886.1:2000MAY19 | 379 | 957 | forward 1 | ras | Ras family | 1.70E−17 |
| 25 | LG:898771.1:2000MAY19 | 525 | 662 | forward 3 | Fork_head | Fork head domain | 1.70E−25 |
| 28 | LI:1085273.2:2000MAY01 | 285 | 1070 | forward 3 | DSPc | Dual specificity phosphatase, | 1.30E−39 |
| | | | | | | catalytic domain | |
| 29 | LI:333138.2:2000MAY01 | 291 | 1016 | forward 3 | pkinase | Eukaryotic protein kinase domain | 2.00E−90 |
| 32 | LG:998283.7:2000FEB18 | 370 | 630 | forward 1 | bromodomain | Bromodomain | 2.60E−29 |
| 32 | LG:998283.7:2000FEB18 | 4 | 153 | forward 1 | PHD | PHD-finger | 1.90E−12 |
| 34 | LI:175223.1:2000FEB01 | 210 | 431 | forward 3 | CSD | ‘Cold-shock’ DNA-binding domair | 1.40E−18 |
| 38 | LG:021371.3:2000FEB18 | 932 | 1000 | forward 2 | zf-C2H2 | Zinc finger, C2H2 type | 2.10E−04 |
| 39 | LG:475404.1:2000FEB18 | 176 | 328 | forward 2 | KRAB | KRAB box | 1.10E−15 |
| 40 | LG:979406.2:2000FEB18 | 85 | 273 | forward 1 | KRAB | KRAB box | 2.40E−34 |
| 41 | LG:410726.1:2000FEB18 | 646 | 834 | forward 1 | KRAB | KRAB box | 2.10E−17 |
| 41 | LG:410726.1:2000FEB18 | 274 | 558 | forward 1 | SCAN | SCAN domain | 8.90E−55 |
| 43 | LG:1076828.1:2000FEB18 | 448 | 516 | forward 1 | zf-C2H2 | Zinc finger, C2H2 type | 2.00E−07 |
| 44 | LG:1076931.1:2000FEB18 | 173 | 310 | forward 2 | KRAB | KRAB box | 3.40E−21 |
| 45 | LG:1078121.1:2000FEB18 | 186 | 374 | forward 3 | KRAB | KRAB box | 2.80E−41 |
| 46 | LG:1079203.1:2000FEB18 | 421 | 489 | forward 1 | zf-C2H2 | Zinc finger, C2H2 type | 6.00E−06 |
| 46 | LG:1079203.1:2000FEB18 | 647 | 715 | forward 2 | zf-C2H2 | Zinc finger, C2H2 type | 9.20E−05 |
| 47 | LG:1082586.1:2000FEB18 | 414 | 536 | forward 3 | KRAB | KRAB box | 6.80E−12 |
| 48 | LG:1082774.1:2000FEB18 | 138 | 326 | forward 3 | KRAB | KRAB box | 1.30E−40 |
| 49 | LG:1082775.1:2000FEB18 | 45 | 230 | forward 3 | KRAB | KRAB box | 7.10E−39 |
| 49 | LG:1082775.1:2000FEB18 | 840 | 908 | forward 3 | zf-C2H2 | Zinc finger, C2H2 type | 4.40E−05 |
| 50 | LG:1083120.1:2000FEB18 | 117 | 266 | forward 3 | KRAB | KRAB box | 5.10E−22 |
| 51 | LG:1087707.1:2000FEB18 | 162 | 350 | forward 3 | KRAB | KRAB box | 2.80E−40 |
| 52 | LG:1090915.1:2000FEB18 | 129 | 251 | forward 3 | KRAB | KRAB box | 7.40E−22 |
| 53 | LG:1094230.1:2000FEB18 | 120 | 308 | forward 3 | KRAB | KRAB box | 3.70E−41 |
| 54 | LG:474848.3:2000FEB18 | 253 | 441 | forward 1 | KRAB | KRAB box | 2.10E−38 |
| 55 | LI:251656.1:2000FEB01 | 242 | 310 | forward 2 | zf-C2H2 | Zinc finger, C2H2 type | 3.90E−08 |
| 56 | LI:021371.1:2000FEB01 | 717 | 785 | forward 3 | zf-C2H2 | Zinc finger, C2H2 type | 2.10E−04 |
| 57 | LI:133095.1:2000FEB01 | 539 | 607 | forward 2 | zf-C2H2 | Zinc finger, C2H2 type | 4.30E−06 |
| 58 | LI:236654.2:2000FEB01 | 805 | 873 | forward 1 | zf-C2H2 | Zinc finger, C2H2 type | 1.40E−04 |
| 59 | LI:200009.1:2000FEB01 | 564 | 632 | forward 3 | zf-C2H2 | Zinc finger, C2H2 type | 1.80E−05 |
| 60 | LI:758502.1:2000FEB01 | 633 | 701 | forward 3 | zf-C2H2 | Zinc finger, C2H2 type | 2.50E−07 |
| 62 | LI:789445.1:2000FEB01 | 71 | 262 | forward 2 | KRAB | KRAB box | 1.60E−27 |
| 63 | LI:789657.1:2000FEB01 | 542 | 610 | forward 2 | zf-C2H2 | Zinc finger, C2H2 type | 2.60E−06 |
| 64 | LI:789808.1:2000FEB01 | 272 | 340 | forward 2 | zf-C2H2 | Zinc finger, C2H2 type | 1.00E−07 |
| 64 | LI:789808.1:2000FEB01 | 426 | 494 | forward 3 | zf-C2H2 | Zinc finger, C2H2 type | 3.40E−04 |
| 65 | LI:792919.1:2000FEB01 | 31 | 99 | forward 1 | zf-C2H2 | Zinc finger, C2H2 type | 5.30E−06 |
| 66 | LI:793949.1:2000FEB01 | 120 | 308 | forward 3 | KRAB | KRAB box | 1.70E−41 |
| 67 | LI:794389.1:2000FEB01 | 75 | 143 | forward 3 | zf-C2H2 | Zinc finger, C2H2 type | 8.70E−06 |
| 68 | LI:796010.1:2000FEB01 | 276 | 344 | forward 3 | zf-C2H2 | Zinc finger, C2H2 type | 1.00E−07 |
| 68 | LI:796010.1:2000FEB01 | 433 | 501 | forward 1 | zf-C2H2 | Zinc finger, C2H2 type | 3.40E−04 |
| 69 | LI:796324.1:2000FEB01 | 290 | 358 | forward 2 | zf-C2H2 | Zinc finger, C2H2 type | 1.00E−07 |
| 69 | LI:796324.1:2000FEB01 | 450 | 518 | forward 3 | zf-C2H2 | Zinc finger, C2H2 type | 3.40E−04 |
| 70 | LI:796373.1:2000FEB01 | 181 | 249 | forward 1 | zf-C2H2 | Zinc finger, C2H2 type | 1.10E−06 |
| 71 | LI:796415.1:2000FEB01 | 45 | 230 | forward 3 | KRAB | KRAB box | 7.10E−39 |
| 72 | LI:798636.1:2000FEB01 | 329 | 397 | forward 2 | zf-C2H2 | Zinc finger, C2H2 type | 2.60E−07 |
| 73 | LI:800045.1:2000FEB01 | 364 | 432 | forward 1 | zf-C2H2 | Zinc finger, C2H2 type | 5.30E−07 |
| 74 | LI:800680.1:2000FEB01 | 155 | 319 | forward 2 | KRAB | KRAB box | 5.00E−21 |
| 75 | LI:800894.1:2000FEB01 | 125 | 313 | forward 2 | KRAB | KRAB box | 6.50E−40 |
| 76 | LI:801015.1:2000FEB01 | 22 | 216 | forward 1 | KRAB | KRAB box | 3.00E−24 |
| 77 | LI:801236.1:2000FEB01 | 225 | 293 | forward 3 | zf-C2H2 | Zinc finger, C2H2 type | 4.40E−07 |
| 78 | LI:803335.1:2000FEB01 | 220 | 408 | forward 1 | KRAB | KRAB box | 2.10E−38 |
| 79 | LI:803998.1:2000FEB01 | 62 | 130 | forward 2 | zf-C2H2 | Zinc finger, C2H2 type | 1.20E−05 |
| 80 | LI:478757.1:2000FEB01 | 467 | 643 | forward 2 | KRAB | KRAB box | 2.40E−21 |
| 81 | LI:808532.1:2000FEB01 | 53 | 121 | forward 2 | zf-C2H2 | Zinc finger, C2H2 type | 5.70E−05 |
| 82 | LI:443073.1:2000FEB01 | 176 | 244 | forward 2 | zf-C2H2 | Zinc finger, C2H2 type | 2.50E−05 |
| 83 | LI:479671.1:2000FEB01 | 160 | 312 | forward 1 | KRAB | KRAB box | 1.70E−19 |
| 84 | LI:810078.1:2000FEB01 | 424 | 492 | forward 1 | zf-C2H2 | Zinc finger, C2H2 type | 1.80E−06 |
| 84 | LI:810078.1:2000FEB01 | 587 | 655 | forward 2 | zf-C2H2 | Zinc finger, C2H2 type | 1.20E−05 |
| 85 | LI:810224.1:2000FEB01 | 171 | 239 | forward 3 | zf-C2H2 | Zinc finger, C2H2 type | 1.00E−07 |
| 86 | LI:817052.2:2000FEB01 | 901 | 969 | forward 1 | zf-C2H2 | Zinc finger, C2H2 type | 8.90E−08 |
| 87 | LG:892274.1:2000MAY19 | 96 | 461 | forward 3 | dUTPase | dUTPase | 9.20E−27 |
| 87 | LG:892274.1:2000MAY19 | 489 | 752 | forward 3 | rvp | Retroviral aspartyl protease | 5.30E−11 |
| 88 | LG:1080959.1:2000MAY19 | 182 | 322 | forward 2 | KRAB | KRAB box | 2.00E−16 |
| 89 | LG:1054900.1:2000MAY19 | 78 | 218 | forward 3 | KRAB | KRAB box | 2.30E−17 |
| 90 | LG:1077357.1:2000MAY19 | 94 | 282 | forward 1 | KRAB | KRAB box | 4.80E−31 |
| 91 | LG:1084051.1:2000MAY19 | 195 | 263 | forward 3 | zf-C2H2 | Zinc finger, C2H2 type | 1.80E−06 |
| 92 | LG:1076853.1:2000MAY19 | 706 | 774 | forward 1 | zf-C2H2 | Zinc finger, C2H2 type | 1.50E−07 |
| 93 | LG:481631.10:2000MAY19 | 96 | 263 | forward 3 | KRAB | KRAB box | 5.70E−25 |
| 93 | LG:481631.10:2000MAY19 | 882 | 950 | forward 3 | zf-C2H2 | Zinc finger, C2H2 type | 1.70E−05 |
| 94 | LG:1088431.2:2000MAY19 | 175 | 339 | forward 1 | KRAB | KRAB box | 5.00E−21 |
| 96 | LI:1144007.1:2000MAY01 | 914 | 1108 | forward 2 | KRAB | KRAB box | 5.90E−05 |
| 96 | LI:1144007.1:2000MAY01 | 323 | 610 | forward 2 | SCAN | SCAN domain | 4.10E−60 |
| 97 | LI:331074.1:2000MAY01 | 194 | 262 | forward 2 | zf-C2H2 | Zinc finger, C2H2 type | 1.00E−03 |
| 98 | LI:1170349.1:2000MAY01 | 185 | 370 | forward 2 | KRAB | KRAB box | 2.50E−29 |
| 98 | LI:1170349.1:2000MAY01 | 740 | 808 | forward 2 | zf-C2H2 | Zinc finger, C2H2 type | 5.80E−05 |
| 102 | LG:101269.1:2000MAY19 | 556 | 831 | forward 1 | IRK | Inward rectifier potassium channel | 3.50E−65 |
| 104 | LI:410188.1:2000MAY01 | 3760 | 4569 | forward 1 | ion_trans | Ion transport protein | 3.70E−97 |
| 104 | LI:410188.1:2000MAY01 | 4586 | 5314 | forward 2 | ion_trans | Ion transport protein | 3.30E−66 |
| 105 | LI:1188288.1:2000MAY01 | 751 | 1215 | forward 1 | SNF | Sodium:neurotransmitter | 8.50E−113 |
| | | | | | | symporter family | |
| 105 | LI:1188288.1:2000MAY01 | 423 | 782 | forward 3 | SNF | Sodium:neurotransmitter | 8.60E−74 |
| | | | | | | symporter family | |
| 105 | LI:1188288.1:2000MAY01 | 1187 | 1438 | forward 2 | SNF | Sodium:neurotransmitter | 5.50E−52 |
| | | | | | | symporter family | |
| 107 | LG:451682.1:2000FEB18 | 117 | 560 | forward 3 | proteasome | Proteasome A-type and B-type | 4.40E−59 |
| 108 | LG:1077283.1:2000FEB18 | 110 | 427 | forward 2 | pro_isomerase | Cyclophilin type peptidyl-prolyl | 1.80E−37 |
| | | | | | | cis-trans isomerase | |
| 108 | LG:1077283.1:2000FEB18 | 177 | 278 | forward 3 | pro_isomerase | Cyclophilin type peptidyl-prolyl | 1.30E−18 |
| | | | | | | cis-trans isomerase | |
| 109 | LG:481436.5:2000FEB18 | 351 | 539 | forward 3 | Dnaj | Dnaj domain | 2.80E−28 |
| 111 | LI:373637.1:2000FEB01 | 17 | 217 | forward 2 | Dnaj | Dnaj domain | 6.30E−39 |
| 113 | LI:053826.1:2000MAY01 | 834 | 1106 | forward 3 | SCP | SCP-like extracellular protein | 1.10E−17 |
| 114 | LI:449393.1:2000MAY01 | 90 | 788 | forward 3 | cpn60_TCP1 | TCP-1/cpn60 chaperonin family | 9.80E−66 |
| 117 | LG:345527.1:2000FEB18 | 667 | 957 | forward 1 | helicase_C | Helicases conserved C-terminal domain | 7.20E−21 |
| 117 | LG:345527.1:2000FEB18 | 8 | 631 | forward 2 | SNF2_N | SNF2 and others N-terminal domain | 7.20E−44 |
| 122 | LI:335671.2:2000FEB01 | 188 | 475 | forward 2 | helicase_C | Heilcases conserved C-terminal domain | 9.10E−13 |
| 122 | LI:335671.2:2000FEB01 | 3 | 95 | forward 3 | SNF2_N | SNF2 and others N-terminal domain | 7.10E−06 |
| 128 | LG:247388.1:2000MAY19 | 346 | 600 | forward 1 | helicase_C | Heilcases conserved C-terminal domain | 2.70E−19 |
| 128 | LG:247388.1:2000MAY19 | 3 | 173 | forward 3 | SNF2_N | SNF2 and others N-terminal domain | 1.60E−14 |
| 131 | LI:331610.2:2000MAY01 | 1415 | 1699 | forward 2 | cadherin | Cadherin domain | 6.00E−20 |
| 135 | LI:903225.1:2000FEB01 | 603 | 764 | forward 3 | Ribosomal_L23 | Ribosomal protein L23 | 4.80E−14 |
| 138 | LI:1169865.1:2000MAY01 | 593 | 790 | forward 2 | ig | Immunoglobulin domain | 2.30E−08 |
| 138 | LI:1169865.1:2000MAY01 | 242 | 547 | forward 2 | MHC_II_alpha | Class II histocompatibility antigen, | 1.80E−65 |
| | | | | | | alpha domain | |
| 139 | LG:337818.2:2000FEB18 | 136 | 1518 | forward 1 | p450 | Cytochrome P450 | 1.50E−173 |
| 140 | LI:337818.1:2000FEB01 | 654 | 998 | forward 3 | p450 | Cytochrome P450 | 3.50E−45 |
| 140 | LI:337818.1:2000FEB01 | 136 | 384 | forward 1 | p450 | Cytochrome P450 | 4.40E−27 |
| 140 | LI:337818.1:2000FEB01 | 359 | 673 | forward 2 | p450 | Cytochrome P450 | 5.40E−27 |
| 143 | LI:414307.1:2000FEB01 | 590 | 964 | forward 2 | C1q | C1q domain | 2.30E−38 |
| 143 | LI:414307.1:2000FEB01 | 365 | 544 | forward 2 | Collagen | Collagen triple helix repeat (20 copies) | 2.50E−10 |
| 144 | LI:202943.2:2000FEB01 | 36 | 209 | forward 3 | sushi | Sushi domain (SCR repeat) | 1.40E−09 |
| 147 | LG:120744.1:2000MAY19 | 301 | 813 | forward 1 | vwa | von Willebrand factor type A domain | 2.00E−51 |
| 148 | LI:757520.1:2000MAY01 | 427 | 1362 | forward 1 | filament | Intermediate filament proteins | 7.10E−157 |
| 149 | LG:160570.1:2000FEB18 | 260 | 562 | forward 2 | Band_41 | FERM domain (Band 4.1 family) | 1.60E−22 |
| 152 | LI:401605.2:2000FEB01 | 1 | 129 | forward 1 | myosin_head | Myosin head (motor domain) | 5.90E−07 |
| 153 | LI:329017.1:2000FEB01 | 226 | 336 | forward 1 | WD40 | WD domain, G-beta repeat | 5.10E−06 |
| 154 | LI:401322.1:2000FEB01 | 156 | 341 | forward 3 | tubulin | Tubulin/FtsZ family | 7.10E−20 |
| 154 | LI:401322.1:2000FEB01 | 371 | 478 | forward 2 | tubulin | Tubulin/FtsZ family | 2.50E−06 |
| 155 | LG:403409.1:2000MAY19 | 1458 | 1652 | forward 3 | FHA | FHA domain | 3.00E−04 |
| 155 | LG:403409.1:2000MAY19 | 78 | 1193 | forward 3 | kinesin | Kinesin motor domain | 6.80E−172 |
| 156 | LG:233933.5:2000MAY19 | 258 | 356 | forward 3 | ank | Ank repeat | 4.90E−06 |
| 157 | LI:290344.1:2000MAY01 | 992 | 1312 | forward 2 | spectrin | Spectrin repeat | 4.10E−07 |
| 157 | LI:290344.1:2000MAY01 | 1361 | 1450 | forward 2 | WW | WW domain | 5.40E−08 |
| 158 | LI:410742.1:2000MAY01 | 599 | 889 | forward 2 | cadherin | Cadherin domain | 1.80E−21 |
| 158 | LI:410742.1:2000MAY01 | 1224 | 1520 | forward 3 | cadherin | Cadherin domain | 9.90E−04 |
| 161 | LI:347687.113:2000MAY01 | 214 | 855 | forward 1 | Myelin_PLP | Myelin proteolipid protein | 7.10E−160 |
| | | | | | | (PLP or lipophilin) | |
| 163 | LG:451710.1:2000FEB18 | 130 | 459 | forward 1 | Ribosomal_L32e | Ribosomal protein L32 | 4.80E−57 |
| 164 | LG:455771.1:2000FEB18 | 69 | 473 | forward 3 | Ribosomal_S12 | Ribosomal protein S12 | 6.60E−78 |
| 165 | LG:452089.1:2000FEB18 | 107 | 268 | forward 2 | Ribosomal_L5 | Ribosomal protein L5 | 2.40E−25 |
| 165 | LG:452089.1:2000FEB18 | 278 | 577 | forward 2 | Ribosomal_L5_C | ribosomal L5P family C-terminus | 2.70E−60 |
| 166 | LG:246415.1:2000FEB18 | 27 | 365 | forward 3 | Ribosomal_S26e | Ribosomal protein S26e | 2.40E−59 |
| 168 | LG:1101445.1:2000FEB18 | 306 | 464 | forward 3 | Ribosomal_L30 | Ribosomal protein L30p/L7e | 4.20E−28 |
| 171 | LI:246422.1:2000FEB01 | 53 | 397 | forward 2 | Ribosomal_L22e | Ribosomal L22e protein family | 4.30E−28 |
| 171 | LI:246422.1:2000FEB01 | 64 | 318 | forward 1 | Ribosomal_L22e | Ribosomal L22e protein family | 7.70E−07 |
| 172 | LG:449404.1:2000MAY19 | 175 | 531 | forward 1 | Ribosomal_S11 | Ribosomal protein S11 | 6.90E−77 |
| 173 | LG:449413.1:2000MAY19 | 99 | 368 | forward 3 | Ribosomal_S12 | Ribosomal protein S12 | 6.10E−47 |
| 173 | LG:449413.1:2000MAY19 | 367 | 504 | forward 1 | Ribosomal_S12 | Ribosomal protein S12 | 3.20E−21 |
| 174 | LG:450105.1:2000MAY19 | 86 | 490 | forward 2 | Ribosomal_S12 | Ribosomal protein S12 | 6.60E−78 |
| 175 | LG:460809.1:2000MAY19 | 3 | 236 | forward 3 | Ribosomal_L31e | Ribosomal protein L31e | 6.00E−17 |
| 176 | LG:481781.1:2000MAY19 | 243 | 671 | forward 3 | Ribosomal_S4e | Ribosomal family S4e | 1.40E−97 |
| 177 | LG:1101153.1:2000MAY19 | 89 | 499 | forward 2 | Ribosomal_L22 | Ribosomal protein L22p/L17e | 5.20E−76 |
| 178 | LI:257695.20:2000MAY01 | 110 | 673 | forward 2 | Ribosomal_S9 | Ribosomal protein S9/S16 | 1.60E−40 |
| 179 | LI:455771.1:2000MAY01 | 69 | 473 | forward 3 | Ribosomal_S12 | Ribosomal protein S12 | 6.60E−78 |
| 181 | LI:035973.1:2000MAY01 | 318 | 479 | forward 3 | Ribosomal_L37e | Ribosomal protein L37e | 1.60E−13 |
| 183 | LG:247781.2:2000FEB18 | 142 | 426 | forward 1 | mito_carr | Mitochondrial carrier proteins | 1.80E−24 |
| 190 | LI:900264.2:2000MAY01 | 1151 | 1555 | forward 2 | PP2C | Protein phosphatase 2C | 2.90E−11 |
| 192 | LI:1189543.1:2000MAY01 | 1292 | 1447 | forward 2 | KH-domain | KH domain | 2.50E−13 |
| 192 | LI:1189543.1:2000MAY01 | 592 | 744 | forward 1 | KH-domain | KH domain | 5.40E−13 |
| 193 | LG:455450.1:2000FEB18 | 1 | 426 | forward 1 | dehydrin | Dehydrins | 4.20E−41 |
| 194 | LG:1040978.1:2000FEB18 | 278 | 481 | forward 2 | pp-binding | Phosphopantetheine attachment site | 3.90E−14 |
| 195 | LG:446649.1:2000FEB18 | 80 | 316 | forward 2 | ACBP | Acyl CoA binding protein | 1.60E−44 |
| 196 | LG:132147.3:2000FEB18 | 1497 | 2414 | forward 3 | HECT | HECT-domain (ubiquitin-transferase). | 9.90E−138 |
| 196 | LG:132147.3:2000FEB18 | 1065 | 1154 | forward 3 | WW | WW domain | 1.50E−12 |
| 198 | LG:162161.1:2000MAY19 | 128 | 385 | forward 2 | TIG | IPT/TIG domain | 5.50E−15 |
| 200 | LG:204626.1:2000MAY19 | 322 | 1212 | forward 1 | Syntaxin | Syntaxin | 8.60E−44 |
| 202 | LI:476342.1:2000MAY01 | 159 | 299 | forward 3 | Gamma-thionin | Gamma-thionins family | 1.70E−19 |
| 205 | LG:482261.1:2000FEB18 | 286 | 552 | forward 1 | Gag_p10 | Retroviral GAG p10 protein | 6.80E−31 |
| 205 | LG:482261.1:2000FEB18 | 1044 | 1229 | forward 3 | gag_p24 | gag gene protein p24 (core nucleocapsid | 2.00E−15 |
| 205 | LG:482261.1:2000FEB18 | 1375 | 1545 | forward 1 | gag_p24 | gag gene protein p24 (core nucleocapsid | 9.50E−15 |
| 206 | LG:480328.1:2000FEB18 | 985 | 1515 | forward 1 | Band_7 | SPFH domain/Band 7 family | 2.60E−39 |
| 206 | LG:480328.1:2000FEB18 | 49 | 117 | forward 1 | zf-C2H2 | Zinc finger, C2H2 type | 1.60E−06 |
| 210 | LG:380497.2:2000MAY19 | 202 | 336 | forward 1 | G-patch | G-patch domain | 7.00E−17 |

[0899] TABLE 3

| | | | | | Domain | |
|---|---|---|---|---|---|---|
| SEQ ID NO: | Template ID | Start | Stop | Frame | Type | Topology |
| 1 | LG:1040582.1:2000FEB18 | 31 | 117 | forward 1 | TM | N in |
| 1 | LG:1040582.1:2000FEB18 | 319 | 405 | forward 1 | TM | N in |
| 1 | LG:1040582.1:2000FEB18 | 108 | 155 | forward 3 | TM | N out |
| 2 | LG:453570.1:2000FEB18 | 361 | 447 | forward 1 | TM | N in |
| 3 | LG:408751.3:2000FEB18 | 1318 | 1404 | forward 1 | TM | N in |
| 3 | LG:408751.3:2000FEB18 | 1025 | 1099 | forward 2 | TM | N in |
| 3 | LG:408751.3:2000FEB18 | 1298 | 1360 | forward 2 | TM | N in |
| 3 | LG:408751.3:2000FEB18 | 1379 | 1441 | forward 2 | TM | N in |
| 3 | LG:408751.3:2000FEB18 | 1463 | 1537 | forward 2 | TM | N in |
| 3 | LG:408751.3:2000FEB18 | 1047 | 1133 | forward 3 | TM | N in |
| 3 | LG:408751.3:2000FEB18 | 1266 | 1352 | forward 3 | TM | N in |
| 3 | LG:408751.3:2000FEB18 | 1419 | 1469 | forward 3 | TM | N in |
| 4 | LI:090574.1:2000FEB01 | 79 | 144 | forward 1 | TM | N in |
| 4 | LI:090574.1:2000FEB01 | 607 | 678 | forward 1 | TM | N in |
| 4 | LI:090574.1:2000FEB01 | 1009 | 1080 | forward 1 | TM | N in |
| 4 | LI:090574.1:2000FEB01 | 497 | 583 | forward 2 | TM | N out |
| 4 | LI:090574.1:2000FEB01 | 743 | 829 | forward 2 | TM | N out |
| 4 | LI:090574.1:2000FEB01 | 1026 | 1085 | forward 3 | TM | N out |
| 5 | LI:229932.2:2000FEB01 | 76 | 162 | forward 1 | TM | N out |
| 5 | LI:229932.2:2000FEB01 | 190 | 276 | forward 1 | TM | N out |
| 5 | LI:229932.2:2000FEB01 | 1237 | 1323 | forward 1 | TM | N out |
| 5 | LI:229932.2:2000FEB01 | 68 | 142 | forward 2 | TM | N in |
| 5 | LI:229932.2:2000FEB01 | 335 | 412 | forward 2 | TM | N in |
| 5 | LI:229932.2:2000FEB01 | 758 | 844 | forward 2 | TM | N in |
| 5 | LI:229932.2:2000FEB01 | 1229 | 1288 | forward 2 | TM | N in |
| 5 | LI:229932.2:2000FEB01 | 60 | 146 | forward 3 | TM | N in |
| 5 | LI:229932.2:2000FEB01 | 216 | 302 | forward 3 | TM | N in |
| 5 | LI:229932.2:2000FEB01 | 690 | 752 | forward 3 | TM | N in |
| 5 | LI:229932.2:2000FEB01 | 765 | 827 | forward 3 | TM | N in |
| 5 | LI:229932.2:2000FEB01 | 1209 | 1289 | forward 3 | TM | N in |
| 6 | LI:332176.1:2000FEB01 | 343 | 399 | forward 1 | TM | N in |
| 6 | LI:332176.1:2000FEB01 | 1078 | 1131 | forward 1 | TM | N in |
| 6 | LI:332176.1:2000FEB01 | 1606 | 1692 | forward 1 | TM | N in |
| 6 | LI:332176.1:2000FEB01 | 2218 | 2274 | forward 1 | TM | N in |
| 6 | LI:332176.1:2000FEB01 | 2383 | 2433 | forward 1 | TM | N in |
| 6 | LI:332176.1:2000FEB01 | 110 | 196 | forward 2 | TM | N in |
| 6 | LI:332176.1:2000FEB01 | 1307 | 1378 | forward 2 | TM | N in |
| 6 | LI:332176.1:2000FEB01 | 1640 | 1726 | forward 2 | TM | N in |
| 6 | LI:332176.1:2000FEB01 | 1946 | 2005 | forward 2 | TM | N in |
| 6 | LI:332176.1:2000FEB01 | 135 | 200 | forward 3 | TM | N in |
| 6 | LI:332176.1:2000FEB01 | 693 | 752 | forward 3 | TM | N in |
| 6 | LI:332176.1:2000FEB01 | 777 | 839 | forward 3 | TM | N in |
| 6 | LI:332176.1:2000FEB01 | 867 | 929 | forward 3 | TM | N in |
| 6 | LI:332176.1:2000FEB01 | 1035 | 1118 | forward 3 | TM | N in |
| 6 | LI:332176.1:2000FEB01 | 1173 | 1253 | forward 3 | TM | N in |
| 6 | LI:332176.1:2000FEB01 | 1572 | 1658 | forward 3 | TM | N in |
| 6 | LI:332176.1:2000FEB01 | 2121 | 2180 | forward 3 | TM | N in |
| 6 | LI:332176.1:2000FEB01 | 2277 | 2363 | forward 3 | TM | N in |
| 6 | LI:332176.1:2000FEB01 | 2400 | 2456 | forward 3 | TM | N in |
| 8 | LG:220992.1:2000MAY19 | 343 | 393 | forward 1 | TM | |
| 8 | LG:220992.1:2000MAY19 | 646 | 732 | forward 1 | TM | |
| 8 | LG:220992.1:2000MAY19 | 1639 | 1725 | forward 1 | TM | |
| 8 | LG:220992.1:2000MAY19 | 1879 | 1965 | forward 1 | TM | |
| 8 | LG:220992.1:2000MAY19 | 2005 | 2088 | forward 1 | TM | |
| 8 | LG:220992.1:2000MAY19 | 17 | 76 | forward 2 | TM | N in |
| 8 | LG:220992.1:2000MAY19 | 1646 | 1732 | forward 2 | TM | N in |
| 8 | LG:220992.1:2000MAY19 | 1850 | 1933 | forward 2 | TM | N in |
| 8 | LG:220992.1:2000MAY19 | 1434 | 1484 | forward 3 | TM | N out |
| 8 | LG:220992.1:2000MAY19 | 1734 | 1820 | forward 3 | TM | N out |
| 8 | LG:220992.1:2000MAY19 | 1974 | 2036 | forward 3 | TM | N out |
| 8 | LG:220992.1:2000MAY19 | 2067 | 2129 | forward 3 | TM | N out |
| 8 | LG:220992.1:2000MAY19 | 2151 | 2237 | forward 3 | TM | N out |
| 9 | LG:1094571.1:2000MAY19 | 781 | 867 | forward 1 | TM | N in |
| 9 | LG:1094571.1:2000MAY19 | 419 | 505 | forward 2 | TM | N in |
| 9 | LG:1094571.1:2000MAY19 | 767 | 853 | forward 2 | TM | N in |
| 9 | LG:1094571.1:2000MAY19 | 756 | 842 | forward 3 | TM | N in |
| 10 | LI:350754.4:2000MAY01 | 277 | 348 | forward 1 | TM | N in |
| 10 | LI:350754.4:2000MAY01 | 583 | 651 | forward 1 | TM | N in |
| 10 | LI:350754.4:2000MAY01 | 670 | 747 | forward 1 | TM | N in |
| 10 | LI:350754.4:2000MAY01 | 381 | 467 | forward 3 | TM | N in |
| 10 | LI:350754.4:2000MAY01 | 2469 | 2555 | forward 3 | TM | N in |
| 12 | LI:1190263.1:2000MAY01 | 664 | 735 | forward 1 | TM | N in |
| 12 | LI:1190263.1:2000MAY01 | 787 | 861 | forward 1 | TM | N in |
| 12 | LI:1190263.1:2000MAY01 | 901 | 954 | forward 1 | TM | N in |
| 12 | LI:1190263.1:2000MAY01 | 188 | 274 | forward 2 | TM | N in |
| 12 | LI:1190263.1:2000MAY01 | 455 | 508 | forward 2 | TM | N in |
| 12 | LI:1190263.1:2000MAY01 | 809 | 895 | forward 2 | TM | N in |
| 12 | LI:1190263.1:2000MAY01 | 1616 | 1663 | forward 2 | TM | N in |
| 12 | LI:1190263.1:2000MAY01 | 183 | 251 | forward 3 | TM | N in |
| 12 | LI:1190263.1:2000MAY01 | 648 | 704 | forward 3 | TM | N in |
| 12 | LI:1190263.1:2000MAY01 | 1149 | 1235 | forward 3 | TM | N in |
| 13 | LG:270916.2:2000FEB18 | 173 | 259 | forward 2 | TM | N out |
| 14 | LG:999414.3:2000FEB18 | 109 | 195 | forward 1 | TM | N out |
| 14 | LG:999414.3:2000FEB18 | 358 | 438 | forward 1 | TM | N out |
| 14 | LG:999414.3:2000FEB18 | 520 | 591 | forward 1 | TM | N out |
| 14 | LG:999414.3:2000FEB18 | 661 | 744 | forward 1 | TM | N out |
| 14 | LG:999414.3:2000FEB18 | 883 | 969 | forward 1 | TM | N out |
| 14 | LG:999414.3:2000FEB18 | 976 | 1062 | forward 1 | TM | N out |
| 14 | LG:999414.3:2000FEB18 | 302 | 388 | forward 2 | TM | N in |
| 14 | LG:999414.3:2000FEB18 | 533 | 613 | forward 2 | TM | N in |
| 14 | LG:999414.3:2000FEB18 | 992 | 1048 | forward 2 | TM | N in |
| 14 | LG:999414.3:2000FEB18 | 1169 | 1246 | forward 2 | TM | N in |
| 14 | LG:999414.3:2000FEB18 | 1307 | 1366 | forward 2 | TM | N in |
| 14 | LG:999414.3:2000FEB18 | 207 | 284 | forward 3 | TM | N out |
| 14 | LG:999414.3:2000FEB18 | 324 | 404 | forward 3 | TM | N out |
| 14 | LG:999414.3:2000FEB18 | 540 | 599 | forward 3 | TM | N out |
| 14 | LG:999414.3:2000FEB18 | 1029 | 1115 | forward 3 | TM | N out |
| 14 | LG:999414.3:2000FEB18 | 1167 | 1253 | forward 3 | TM | N out |
| 14 | LG:999414.3:2000FEB18 | 1314 | 1373 | forward 3 | TM | N out |
| 15 | LG:429446.1:2000FEB18 | 628 | 699 | forward 1 | TM | N out |
| 15 | LG:429446.1:2000FEB18 | 629 | 682 | forward 2 | TM | N in |
| 15 | LG:429446.1:2000FEB18 | 627 | 713 | forward 3 | TM | N in |
| 16 | LI:057229.1:2000FEB01 | 10 | 69 | forward 1 | TM | |
| 16 | LI:057229.1:2000FEB01 | 118 | 198 | forward 1 | TM | |
| 16 | LI:057229.1:2000FEB01 | 292 | 360 | forward 1 | TM | |
| 16 | LI:057229.1:2000FEB01 | 11 | 67 | forward 2 | TM | |
| 16 | LI:057229.1:2000FEB01 | 146 | 226 | forward 2 | TM | |
| 16 | LI:057229.1:2000FEB01 | 290 | 355 | forward 2 | TM | |
| 16 | LI:057229.1:2000FEB01 | 12 | 71 | forward 3 | TM | N out |
| 16 | LI:057229.1:2000FEB01 | 114 | 176 | forward 3 | TM | N out |
| 17 | LI:351965.1:2000FEB01 | 487 | 573 | forward 1 | TM | |
| 17 | LI:351965.1:2000FEB01 | 1036 | 1098 | forward 1 | TM | |
| 17 | LI:351965.1:2000FEB01 | 492 | 578 | forward 3 | TM | N in |
| 17 | LI:351965.1:2000FEB01 | 969 | 1055 | forward 3 | TM | N in |
| 17 | LI:351965.1:2000FEB01 | 1098 | 1184 | forward 3 | TM | N in |
| 18 | LG:068682.1:2000FEB18 | 707 | 793 | forward 2 | TM | N out |
| 19 | LG:242665.1:2000FEB18 | 10 | 63 | forward 1 | TM | N out |
| 19 | LG:242665.1:2000FEB18 | 12 | 62 | forward 3 | TM | N out |
| 19 | LG:242665.1:2000FEB18 | 333 | 398 | forward 3 | TM | N out |
| 20 | LG:241743.1:2000FEB18 | 43 | 99 | forward 1 | TM | N out |
| 21 | LI:034212.1:2000FEB01 | 1300 | 1365 | forward 1 | TM | N in |
| 21 | LI:034212.1:2000FEB01 | 1570 | 1647 | forward 1 | TM | N in |
| 21 | LI:034212.1:2000FEB01 | 2386 | 2472 | forward 1 | TM | N in |
| 21 | LI:034212.1:2000FEB01 | 2533 | 2598 | forward 1 | TM | N in |
| 21 | LI:034212.1:2000FEB01 | 2620 | 2706 | forward 1 | TM | N in |
| 21 | LI:034212.1:2000FEB01 | 2740 | 2826 | forward 1 | TM | N in |
| 21 | LI:034212.1:2000FEB01 | 719 | 805 | forward 2 | TM | |
| 21 | LI:034212.1:2000FEB01 | 1205 | 1291 | forward 2 | TM | |
| 21 | LI:034212.1:2000FEB01 | 1460 | 1546 | forward 2 | TM | |
| 21 | LI:034212.1:2000FEB01 | 1685 | 1768 | forward 2 | TM | |
| 21 | LI:034212.1:2000FEB01 | 1814 | 1882 | forward 2 | TM | |
| 21 | LI:034212.1:2000FEB01 | 2066 | 2128 | forward 2 | TM | |
| 21 | LI:034212.1:2000FEB01 | 2156 | 2218 | forward 2 | TM | |
| 21 | LI:034212.1:2000FEB01 | 2540 | 2626 | forward 2 | TM | |
| 21 | LI:034212.1:2000FEB01 | 2657 | 2734 | forward 2 | TM | |
| 21 | LI:034212.1:2000FEB01 | 12 | 62 | forward 3 | TM | N out |
| 21 | LI:034212.1:2000FEB01 | 1236 | 1301 | forward 3 | TM | N out |
| 21 | LI:034212.1:2000FEB01 | 1590 | 1646 | forward 3 | TM | N out |
| 21 | LI:034212.1:2000FEB01 | 1668 | 1721 | forward 3 | TM | N out |
| 21 | LI:034212.1:2000FEB01 | 2130 | 2216 | forward 3 | TM | N out |
| 21 | LI:034212.1:2000FEB01 | 2295 | 2381 | forward 3 | TM | N out |
| 21 | LI:034212.1:2000FEB01 | 2436 | 2513 | forward 3 | TM | N out |
| 21 | LI:034212.1:2000FEB01 | 2538 | 2624 | forward 3 | TM | N out |
| 21 | LI:034212.1:2000FEB01 | 2667 | 2735 | forward 3 | TM | N out |
| 22 | LG:344886.1:2000MAY19 | 937 | 1002 | forward 1 | TM | N in |
| 22 | LG:344886.1:2000MAY19 | 1081 | 1155 | forward 1 | TM | N in |
| 22 | LG:344886.1:2000MAY19 | 1696 | 1782 | forward 1 | TM | N in |
| 22 | LG:344886.1:2000MAY19 | 413 | 463 | forward 2 | TM | N in |
| 22 | LG:344886.1:2000MAY19 | 551 | 637 | forward 2 | TM | N in |
| 22 | LG:344886.1:2000MAY19 | 950 | 1012 | forward 2 | TM | N in |
| 22 | LG:344886.1:2000MAY19 | 1031 | 1093 | forward 2 | TM | N in |
| 22 | LG:344886.1:2000MAY19 | 1112 | 1183 | forward 2 | TM | N in |
| 22 | LG:344886.1:2000MAY19 | 1271 | 1348 | forward 2 | TM | N in |
| 22 | LG:344886.1:2000MAY19 | 1634 | 1720 | forward 2 | TM | N in |
| 22 | LG:344886.1:2000MAY19 | 567 | 626 | forward 3 | TM | N in |
| 22 | LG:344886.1:2000MAY19 | 1011 | 1073 | forward 3 | TM | N in |
| 22 | LG:344886.1:2000MAY19 | 1089 | 1151 | forward 3 | TM | N in |
| 22 | LG:344886.1:2000MAY19 | 1707 | 1757 | forward 3 | TM | N in |
| 23 | LG:228930.1:2000MAY19 | 111 | 167 | forward 3 | TM | N in |
| 24 | LG:338927.1:2000MAY19 | 934 | 1020 | forward 1 | TM | N out |
| 24 | LG:338927.1:2000MAY19 | 1133 | 1219 | forward 2 | TM | N in |
| 24 | LG:338927.1:2000MAY19 | 1170 | 1250 | forward 3 | TM | N in |
| 25 | LG:898771.1:2000MAY19 | 1261 | 1314 | forward 1 | TM | N out |
| 25 | LG:898771.1:2000MAY19 | 1397 | 1450 | forward 2 | TM | N out |
| 26 | LI:257664.67:2000MAY01 | 280 | 366 | forward 1 | TM | N in |
| 26 | LI:257664.67:2000MAY01 | 421 | 498 | forward 1 | TM | N in |
| 26 | LI:257664.67:2000MAY01 | 12 | 71 | forward 3 | TM | N out |
| 27 | LI:001496.2:2000MAY01 | 399 | 473 | forward 3 | TM | |
| 28 | LI:1085273.2:2000MAY01 | 2188 | 2274 | forward 1 | TM | N in |
| 28 | LI:1085273.2:2000MAY01 | 503 | 583 | forward 2 | TM | N out |
| 28 | LI:1085273.2:2000MAY01 | 2126 | 2194 | forward 2 | TM | N out |
| 28 | LI:1085273.2:2000MAY01 | 897 | 968 | forward 3 | TM | N in |
| 29 | LI:333138.2:2000MAY01 | 1930 | 2016 | forward 1 | TM | N out |
| 29 | LI:333138.2:2000MAY01 | 50 | 103 | forward 2 | TM | |
| 29 | LI:333138.2:2000MAY01 | 884 | 940 | forward 2 | TM | |
| 29 | LI:333138.2:2000MAY01 | 114 | 179 | forward 3 | TM | N out |
| 29 | LI:333138.2:2000MAY01 | 273 | 356 | forward 3 | TM | N out |
| 29 | LI:333138.2:2000MAY01 | 819 | 875 | forward 3 | TM | N out |
| 29 | LI:333138.2:2000MAY01 | 1581 | 1667 | forward 3 | TM | N out |
| 30 | LI:338927.1:2000MAY01 | 1069 | 1140 | forward 1 | TM | N in |
| 30 | LI:338927.1:2000MAY01 | 968 | 1051 | forward 2 | TM | N in |
| 30 | LI:338927.1:2000MAY01 | 1056 | 1118 | forward 3 | TM | N out |
| 30 | LI:338927.1:2000MAY01 | 1155 | 1217 | forward 3 | TM | N out |
| 31 | LG:335558.1:2000FEB18 | 518 | 604 | forward 2 | TM | N in |
| 31 | LG:335558.1:2000FEB18 | 614 | 682 | forward 2 | TM | N in |
| 31 | LG:335558.1:2000FEB18 | 761 | 829 | forward 2 | TM | N in |
| 31 | LG:335558.1:2000FEB18 | 798 | 860 | forward 3 | TM | N in |
| 31 | LG:335558.1:2000FEB18 | 882 | 944 | forward 3 | TM | N in |
| 31 | LG:335558.1:2000FEB18 | 966 | 1028 | forward 3 | TM | N in |
| 32 | LG:998283.7:2000FEB18 | 1066 | 1146 | forward 1 | TM | N in |
| 32 | LG:998283.7:2000FEB18 | 23 | 109 | forward 2 | TM | N in |
| 32 | LG:998283.7:2000FEB18 | 194 | 280 | forward 2 | TM | N in |
| 32 | LG:998283.7:2000FEB18 | 392 | 478 | forward 2 | TM | N in |
| 32 | LG:998283.7:2000FEB18 | 527 | 613 | forward 2 | TM | N in |
| 32 | LG:998283.7:2000FEB18 | 776 | 862 | forward 2 | TM | N in |
| 32 | LG:998283.7:2000FEB18 | 1064 | 1141 | forward 2 | TM | N in |
| 32 | LG:998283.7:2000FEB18 | 12 | 65 | forward 3 | TM | N in |
| 32 | LG:998283.7:2000FEB18 | 147 | 227 | forward 3 | TM | N in |
| 32 | LG:998283.7:2000FEB18 | 684 | 770 | forward 3 | TM | N in |
| 32 | LG:998283.7:2000FEB18 | 1011 | 1097 | forward 3 | TM | N in |
| 33 | LI:402739.1:2000FEB01 | 415 | 501 | forward 1 | TM | N in |
| 35 | LG:981076.2:2000MAY19 | 388 | 450 | forward 1 | TM | N in |
| 35 | LG:981076.2:2000MAY19 | 20 | 82 | forward 2 | TM | N out |
| 35 | LG:981076.2:2000MAY19 | 389 | 451 | forward 2 | TM | N out |
| 35 | LG:981076.2:2000MAY19 | 464 | 526 | forward 2 | TM | N out |
| 35 | LG:981076.2:2000MAY19 | 539 | 604 | forward 2 | TM | N out |
| 35 | LG:981076.2:2000MAY19 | 438 | 524 | forward 3 | TM | N in |
| 37 | LI:1190250.1:2000MAY01 | 530 | 613 | forward 2 | TM | |
| 37 | LI:1190250.1:2000MAY01 | 558 | 635 | forward 3 | TM | N out |
| 38 | LG:021371.3:2000FEB18 | 122 | 208 | forward 2 | TM | N in |
| 41 | LG:410726.1:2000FEB18 | 22 | 108 | forward 1 | TM | N in |
| 41 | LG:410726.1:2000FEB18 | 385 | 471 | forward 1 | TM | N in |
| 42 | LG:200005.1:2000FEB18 | 166 | 222 | forward 1 | TM | N out |
| 42 | LG:200005.1:2000FEB18 | 185 | 232 | forward 2 | TM | N out |
| 42 | LG:200005.1:2000FEB18 | 162 | 248 | forward 3 | TM | N out |
| 46 | LG:1079203.1:2000FEB18 | 11 | 70 | forward 2 | TM | N in |
| 46 | LG:1079203.1:2000FEB18 | 125 | 196 | forward 2 | TM | N in |
| 46 | LG:1079203.1:2000FEB18 | 965 | 1051 | forward 2 | TM | N in |
| 47 | LG:1082586.1:2000FEB18 | 256 | 339 | forward 1 | TM | N in |
| 47 | LG:1082586.1:2000FEB18 | 248 | 316 | forward 2 | TM | N out |
| 49 | LG:1082775.1:2000FEB18 | 553 | 606 | forward 1 | TM | N in |
| 50 | LG:1083120.1:2000FEB18 | 214 | 291 | forward 1 | TM | N out |
| 50 | LG:1083120.1:2000FEB18 | 233 | 319 | forward 2 | TM | N out |
| 50 | LG:1083120.1:2000FEB18 | 252 | 320 | forward 3 | TM | N in |
| 51 | LG:1087707.1:2000FEB18 | 367 | 453 | forward 1 | TM | N out |
| 51 | LG:1087707.1:2000FEB18 | 469 | 531 | forward 1 | TM | N out |
| 51 | LG:1087707.1:2000FEB18 | 667 | 729 | forward 1 | TM | N out |
| 51 | LG:1087707.1:2000FEB18 | 742 | 804 | forward 1 | TM | N out |
| 51 | LG:1087707.1:2000FEB18 | 407 | 481 | forward 2 | TM | N in |
| 51 | LG:1087707.1:2000FEB18 | 671 | 739 | forward 2 | TM | N in |
| 51 | LG:1087707.1:2000FEB18 | 743 | 811 | forward 2 | TM | N in |
| 51 | LG:1087707.1:2000FEB18 | 570 | 641 | forward 3 | TM | N out |
| 51 | LG:1087707.1:2000FEB18 | 747 | 833 | forward 3 | TM | N out |
| 52 | LG:1090915.1:2000FEB18 | 11 | 61 | forward 2 | TM | N out |
| 53 | LG:1094230.1:2000FEB18 | 469 | 555 | forward 1 | TM | N out |
| 53 | LG:1094230.1:2000FEB18 | 449 | 535 | forward 2 | TM | N out |
| 54 | LG:474848.3:2000FEB18 | 445 | 531 | forward 1 | TM | N out |
| 54 | LG:474848.3:2000FEB18 | 456 | 518 | forward 3 | TM | N out |
| 58 | LI:236654.2:2000FEB01 | 221 | 307 | forward 2 | TM | N out |
| 59 | LI:200009.1:2000FEB01 | 1045 | 1131 | forward 1 | TM | N out |
| 59 | LI:200009.1:2000FEB01 | 1171 | 1233 | forward 1 | TM | N out |
| 59 | LI:200009.1:2000FEB01 | 1076 | 1162 | forward 2 | TM | N in |
| 59 | LI:200009.1:2000FEB01 | 1044 | 1130 | forward 3 | TM | N in |
| 60 | LI:758502.1:2000FEB01 | 286 | 369 | forward 1 | TM | N out |
| 60 | LI:758502.1:2000FEB01 | 755 | 805 | forward 2 | TM | N in |
| 60 | LI:758502.1:2000FEB01 | 780 | 833 | forward 3 | TM | N in |
| 62 | LI:789445.1:2000FEB01 | 9 | 80 | forward 3 | TM | N out |
| 63 | LI:789657.1:2000FEB01 | 854 | 937 | forward 2 | TM | N in |
| 64 | LI:789808.1:2000FEB01 | 347 | 400 | forward 2 | TM | N in |
| 65 | LI:792919.1:2000FEB01 | 176 | 256 | forward 2 | TM | |
| 65 | LI:792919.1:2000FEB01 | 371 | 427 | forward 2 | TM | |
| 66 | LI:793949.1:2000FEB01 | 208 | 282 | forward 1 | TM | N out |
| 66 | LI:793949.1:2000FEB01 | 472 | 558 | forward 1 | TM | N out |
| 66 | LI:793949.1:2000FEB01 | 455 | 541 | forward 2 | TM | N out |
| 67 | LI:794389.1:2000FEB01 | 265 | 333 | forward 1 | TM | N out |
| 67 | LI:794389.1:2000FEB01 | 424 | 477 | forward 1 | TM | N out |
| 67 | LI:794389.1:2000FEB01 | 384 | 455 | forward 3 | TM | N in |
| 68 | LI:796010.1:2000FEB01 | 351 | 404 | forward 3 | TM | N in |
| 69 | LI:796324.1:2000FEB01 | 365 | 418 | forward 2 | TM | N in |
| 72 | LI:798636.1:2000FEB01 | 490 | 543 | forward 1 | TM | N in |
| 73 | LI:800045.1:2000FEB01 | 627 | 701 | forward 3 | TM | N in |
| 74 | LI:800680.1:2000FEB01 | 334 | 411 | forward 1 | TM | N out |
| 74 | LI:800680.1:2000FEB01 | 359 | 421 | forward 2 | TM | N out |
| 75 | LI:800894.1:2000FEB01 | 536 | 592 | forward 2 | TM | N in |
| 75 | LI:800894.1:2000FEB01 | 300 | 374 | forward 3 | TM | N out |
| 75 | LI:800894.1:2000FEB01 | 396 | 482 | forward 3 | TM | N out |
| 77 | LI:801236.1:2000FEB01 | 262 | 318 | forward 1 | TM | N out |
| 78 | LI:803335.1:2000FEB01 | 412 | 498 | forward 1 | TM | N out |
| 78 | LI:803335.1:2000FEB01 | 423 | 485 | forward 3 | TM | N out |
| 79 | LI:803998.1:2000FEB01 | 221 | 307 | forward 2 | TM | N out |
| 81 | LI:808532.1:2000FEB01 | 472 | 558 | forward 1 | TM | N in |
| 81 | LI:808532.1:2000FEB01 | 117 | 203 | forward 3 | TM | N in |
| 81 | LI:808532.1:2000FEB01 | 363 | 443 | forward 3 | TM | N in |
| 81 | LI:808532.1:2000FEB01 | 558 | 623 | forward 3 | TM | N in |
| 82 | LI:443073.1:2000FEB01 | 293 | 379 | forward 2 | TM | N in |
| 82 | LI:443073.1:2000FEB01 | 81 | 152 | forward 3 | TM | N in |
| 82 | LI:443073.1:2000FEB01 | 189 | 260 | forward 3 | TM | N in |
| 83 | LI:479671.1:2000FEB01 | 523 | 579 | forward 1 | TM | N out |
| 85 | LI:810224.1:2000FEB01 | 246 | 299 | forward 3 | TM | |
| 87 | LG:892274.1:2000MAY19 | 49 | 105 | forward 1 | TM | N out |
| 87 | LG:892274.1:2000MAY19 | 613 | 681 | forward 1 | TM | N out |
| 87 | LG:892274.1:2000MAY19 | 506 | 589 | forward 2 | TM | N in |
| 91 | LG:1084051.1:2000MAY19 | 301 | 363 | forward 1 | TM | N in |
| 92 | LG:1076853.1:2000MAY19 | 964 | 1050 | forward 1 | TM | N in |
| 92 | LG:1076853.1:2000MAY19 | 56 | 130 | forward 2 | TM | N out |
| 92 | LG:1076853.1:2000MAY19 | 741 | 818 | forward 3 | TM | N in |
| 93 | LG:481631.10:2000MAY19 | 298 | 357 | forward 1 | TM | N out |
| 93 | LG:481631.10:2000MAY19 | 598 | 654 | forward 1 | TM | N out |
| 94 | LG:1088431.2:2000MAY19 | 379 | 441 | forward 1 | TM | N out |
| 94 | LG:1088431.2:2000MAY19 | 354 | 431 | forward 3 | TM | N out |
| 95 | LI:401619.10:2000MAY01 | 157 | 219 | forward 1 | TM | N out |
| 95 | LI:401619.10:2000MAY01 | 232 | 294 | forward 1 | TM | N out |
| 95 | LI:401619.10:2000MAY01 | 502 | 576 | forward 1 | TM | N out |
| 95 | LI:401619.10:2000MAY01 | 146 | 232 | forward 2 | TM | N in |
| 95 | LI:401619.10:2000MAY01 | 326 | 412 | forward 2 | TM | N in |
| 95 | LI:401619.10:2000MAY01 | 440 | 490 | forward 2 | TM | N in |
| 95 | LI:401619.10:2000MAY01 | 512 | 580 | forward 2 | TM | N in |
| 95 | LI:401619.10:2000MAY01 | 186 | 257 | forward 3 | TM | N in |
| 95 | LI:401619.10:2000MAY01 | 528 | 599 | forward 3 | TM | N in |
| 96 | LI:1144007.1:2000MAY01 | 2833 | 2910 | forward 1 | TM | N in |
| 96 | LI:1144007.1:2000MAY01 | 3301 | 3378 | forward 1 | TM | N in |
| 96 | LI:1144007.1:2000MAY01 | 3511 | 3597 | forward 1 | TM | N in |
| 96 | LI:1144007.1:2000MAY01 | 3634 | 3696 | forward 1 | TM | N in |
| 96 | LI:1144007.1:2000MAY01 | 3736 | 3801 | forward 1 | TM | N in |
| 96 | LI:1144007.1:2000MAY01 | 2645 | 2725 | forward 2 | TM | N out |
| 96 | LI:1144007.1:2000MAY01 | 2879 | 2965 | forward 2 | TM | N out |
| 96 | LI:1144007.1:2000MAY01 | 3356 | 3433 | forward 2 | TM | N out |
| 96 | LI:1144007.1:2000MAY01 | 3476 | 3523 | forward 2 | TM | N out |
| 96 | LI:1144007.1:2000MAY01 | 2772 | 2858 | forward 3 | TM | N in |
| 96 | LI:1144007.1:2000MAY01 | 3258 | 3332 | forward 3 | TM | N in |
| 96 | LI:1144007.1:2000MAY01 | 4017 | 4097 | forward 3 | TM | N in |
| 97 | LI:331074.1:2000MAY01 | 1264 | 1326 | forward 1 | TM | N in |
| 97 | LI:331074.1:2000MAY01 | 1357 | 1419 | forward 1 | TM | N in |
| 97 | LI:331074.1:2000MAY01 | 1450 | 1512 | forward 1 | TM | N in |
| 97 | LI:331074.1:2000MAY01 | 1540 | 1626 | forward 1 | TM | N in |
| 97 | LI:331074.1:2000MAY01 | 1433 | 1513 | forward 2 | TM | N in |
| 97 | LI:331074.1:2000MAY01 | 1574 | 1660 | forward 2 | TM | N in |
| 97 | LI:331074.1:2000MAY01 | 1461 | 1529 | forward 3 | TM | N in |
| 97 | LI:331074.1:2000MAY01 | 1560 | 1646 | forward 3 | TM | N in |
| 98 | LI:1170349.1:2000MAY01 | 34 | 102 | forward 1 | TM | N in |
| 99 | LG:335097.1:2000FEB18 | 601 | 672 | forward 1 | TM | N out |
| 99 | LG:335097.1:2000FEB18 | 847 | 909 | forward 1 | TM | N out |
| 99 | LG:335097.1:2000FEB18 | 928 | 981 | forward 1 | TM | N out |
| 99 | LG:335097.1:2000FEB18 | 164 | 244 | forward 2 | TM | N out |
| 99 | LG:335097.1:2000FEB18 | 623 | 682 | forward 2 | TM | N out |
| 99 | LG:335097.1:2000FEB18 | 12 | 74 | forward 3 | TM | N in |
| 99 | LG:335097.1:2000FEB18 | 219 | 299 | forward 3 | TM | N in |
| 99 | LG:335097.1:2000FEB18 | 594 | 680 | forward 3 | TM | N in |
| 100 | LG:1076451.1:2000FEB18 | 94 | 156 | forward 1 | TM | N in |
| 100 | LG:1076451.1:2000FEB18 | 101 | 187 | forward 2 | TM | N out |
| 100 | LG:1076451.1:2000FEB18 | 18 | 98 | forward 3 | TM | N out |
| 100 | LG:1076451.1:2000FEB18 | 96 | 164 | forward 3 | TM | N out |
| 100 | LG:1076451.1:2000FEB18 | 216 | 290 | forward 3 | TM | N out |
| 101 | LI:805478.1:2000FEB01 | 83 | 136 | forward 2 | TM | N out |
| 101 | LI:805478.1:2000FEB01 | 212 | 298 | forward 2 | TM | N out |
| 102 | LG:101269.1:2000MAY19 | 655 | 741 | forward 1 | TM | N in |
| 102 | LG:101269.1:2000MAY19 | 650 | 736 | forward 2 | TM | N in |
| 102 | LG:101269.1:2000MAY19 | 96 | 182 | forward 3 | TM | N in |
| 102 | LG:101269.1:2000MAY19 | 249 | 335 | forward 3 | TM | N in |
| 102 | LG:101269.1:2000MAY19 | 663 | 740 | forward 3 | TM | N in |
| 103 | LI:331087.1:2000MAY01 | 251 | 298 | forward 2 | TM | N out |
| 103 | LI:331087.1:2000MAY01 | 237 | 311 | forward 3 | TM | |
| 104 | LI:410188.1:2000MAY01 | 520 | 591 | forward 1 | TM | N in |
| 104 | LI:410188.1:2000MAY01 | 640 | 711 | forward 1 | TM | N in |
| 104 | LI:410188.1:2000MAY01 | 724 | 810 | forward 1 | TM | N in |
| 104 | LI:410188.1:2000MAY01 | 832 | 879 | forward 1 | TM | N in |
| 104 | LI:410188.1:2000MAY01 | 883 | 969 | forward 1 | TM | N in |
| 104 | LI:410188.1:2000MAY01 | 1171 | 1257 | forward 1 | TM | N in |
| 104 | LI:410188.1:2000MAY01 | 1303 | 1389 | forward 1 | TM | N in |
| 104 | LI:410188.1:2000MAY01 | 2290 | 2361 | forward 1 | TM | N in |
| 104 | LI:410188.1:2000MAY01 | 2389 | 2460 | forward 1 | TM | N in |
| 104 | LI:410188.1:2000MAY01 | 2470 | 2556 | forward 1 | TM | N in |
| 104 | LI:410188.1:2000MAY01 | 2635 | 2721 | forward 1 | TM | N in |
| 104 | LI:410188.1:2000MAY01 | 2794 | 2862 | forward 1 | TM | N in |
| 104 | LI:410188.1:2000MAY01 | 2878 | 2964 | forward 1 | TM | N in |
| 104 | LI:410188.1:2000MAY01 | 3757 | 3837 | forward 1 | TM | N in |
| 104 | LI:410188.1:2000MAY01 | 3871 | 3957 | forward 1 | TM | N in |
| 104 | LI:410188.1:2000MAY01 | 3961 | 4047 | forward 1 | TM | N in |
| 104 | LI:410188.1:2000MAY01 | 4111 | 4194 | forward 1 | TM | N in |
| 104 | LI:410188.1:2000MAY01 | 4342 | 4428 | forward 1 | TM | N in |
| 104 | LI:410188.1:2000MAY01 | 4492 | 4578 | forward 1 | TM | N in |
| 104 | LI:410188.1:2000MAY01 | 4714 | 4794 | forward 1 | TM | N in |
| 104 | LI:410188.1:2000MAY01 | 6439 | 6519 | forward 1 | TM | N in |
| 104 | LI:410188.1:2000MAY01 | 7492 | 7575 | forward 1 | TM | N in |
| 104 | LI:410188.1:2000MAY01 | 7783 | 7845 | forward 1 | TM | N in |
| 104 | LI:410188.1:2000MAY01 | 4673 | 4735 | forward 2 | TM | N in |
| 104 | LI:410188.1:2000MAY01 | 4766 | 4828 | forward 2 | TM | N in |
| 104 | LI:410188.1:2000MAY01 | 4928 | 5014 | forward 2 | TM | N in |
| 104 | LI:410188.1:2000MAY01 | 5231 | 5317 | forward 2 | TM | N in |
| 104 | LI:410188.1:2000MAY01 | 6341 | 6409 | forward 2 | TM | N in |
| 104 | LI:410188.1:2000MAY01 | 7655 | 7741 | forward 2 | TM | N in |
| 104 | LI:410188.1:2000MAY01 | 8060 | 8146 | forward 2 | TM | N in |
| 104 | LI:410188.1:2000MAY01 | 4776 | 4859 | forward 3 | TM | N in |
| 104 | LI:410188.1:2000MAY01 | 6309 | 6371 | forward 3 | TM | N in |
| 104 | LI:410188.1:2000MAY01 | 7704 | 7775 | forward 3 | TM | N in |
| 105 | LI:1188288.1:2000MAY01 | 457 | 519 | forward 1 | TM | |
| 105 | LI:1188288.1:2000MAY01 | 841 | 915 | forward 1 | TM | |
| 105 | LI:1188288.1:2000MAY01 | 958 | 1038 | forward 1 | TM | |
| 105 | LI:1188288.1:2000MAY01 | 1072 | 1140 | forward 1 | TM | |
| 105 | LI:1188288.1:2000MAY01 | 1477 | 1539 | forward 1 | TM | |
| 105 | LI:1188288.1:2000MAY01 | 1564 | 1626 | forward 1 | TM | |
| 105 | LI:1188288.1:2000MAY01 | 1810 | 1896 | forward 1 | TM | |
| 105 | LI:1188288.1:2000MAY01 | 2134 | 2220 | forward 1 | TM | |
| 105 | LI:1188288.1:2000MAY01 | 2734 | 2820 | forward 1 | TM | |
| 105 | LI:1188288.1:2000MAY01 | 1067 | 1147 | forward 2 | TM | N out |
| 105 | LI:1188288.1:2000MAY01 | 1157 | 1243 | forward 2 | TM | N out |
| 105 | LI:1188288.1:2000MAY01 | 1313 | 1399 | forward 2 | TM | N out |
| 105 | LI:1188288.1:2000MAY01 | 1556 | 1618 | forward 2 | TM | N out |
| 105 | LI:1188288.1:2000MAY01 | 2294 | 2368 | forward 2 | TM | N out |
| 105 | LI:1188288.1:2000MAY01 | 435 | 521 | forward 3 | TM | N in |
| 105 | LI:1188288.1:2000MAY01 | 597 | 683 | forward 3 | TM | N in |
| 105 | LI:1188288.1:2000MAY01 | 2301 | 2354 | forward 3 | TM | N in |
| 105 | LI:1188288.1:2000MAY01 | 2700 | 2753 | forward 3 | TM | N in |
| 106 | LI:427997.4:2000MAY01 | 148 | 222 | forward 1 | TM | N in |
| 106 | LI:427997.4:2000MAY01 | 745 | 828 | forward 1 | TM | N in |
| 106 | LI:427997.4:2000MAY01 | 1192 | 1278 | forward 1 | TM | N in |
| 106 | LI:427997.4:2000MAY01 | 1351 | 1434 | forward 1 | TM | N in |
| 106 | LI:427997.4:2000MAY01 | 1450 | 1518 | forward 1 | TM | N in |
| 106 | LI:427997.4:2000MAY01 | 1759 | 1845 | forward 1 | TM | N in |
| 106 | LI:427997.4:2000MAY01 | 134 | 220 | forward 2 | TM | N in |
| 106 | LI:427997.4:2000MAY01 | 749 | 832 | forward 2 | TM | N in |
| 106 | LI:427997.4:2000MAY01 | 1031 | 1087 | forward 2 | TM | N in |
| 106 | LI:427997.4:2000MAY01 | 1607 | 1693 | forward 2 | TM | N in |
| 106 | LI:427997.4:2000MAY01 | 1730 | 1816 | forward 2 | TM | N in |
| 106 | LI:427997.4:2000MAY01 | 2111 | 2191 | forward 2 | TM | N in |
| 106 | LI:427997.4:2000MAY01 | 150 | 236 | forward 3 | TM | N in |
| 106 | LI:427997.4:2000MAY01 | 681 | 767 | forward 3 | TM | N in |
| 106 | LI:427997.4:2000MAY01 | 765 | 851 | forward 3 | TM | N in |
| 106 | LI:427997.4:2000MAY01 | 1068 | 1124 | forward 3 | TM | N in |
| 106 | LI:427997.4:2000MAY01 | 1665 | 1751 | forward 3 | TM | N in |
| 106 | LI:427997.4:2000MAY01 | 1782 | 1856 | forward 3 | TM | N in |
| 107 | LG:451682.1:2000FEB18 | 93 | 155 | forward 3 | TM | |
| 109 | LG:481436.5:2000FEB18 | 583 | 669 | forward 1 | TM | N in |
| 109 | LG:481436.5:2000FEB18 | 769 | 834 | forward 1 | TM | N in |
| 109 | LG:481436.5:2000FEB18 | 1111 | 1176 | forward 1 | TM | N in |
| 109 | LG:481436.5:2000FEB18 | 575 | 655 | forward 2 | TM | N out |
| 109 | LG:481436.5:2000FEB18 | 764 | 826 | forward 2 | TM | N out |
| 109 | LG:481436.5:2000FEB18 | 1091 | 1153 | forward 2 | TM | N out |
| 109 | LG:481436.5:2000FEB18 | 1187 | 1249 | forward 2 | TM | N out |
| 109 | LG:481436.5:2000FEB18 | 84 | 170 | forward 3 | TM | N in |
| 109 | LG:481436.5:2000FEB18 | 753 | 833 | forward 3 | TM | N in |
| 109 | LG:481436.5:2000FEB18 | 1164 | 1241 | forward 3 | TM | N in |
| 110 | LI:793701.1:2000FEB01 | 352 | 405 | forward 1 | TM | N in |
| 110 | LI:793701.1:2000FEB01 | 389 | 475 | forward 2 | TM | N in |
| 111 | LI:373637.1:2000FEB01 | 412 | 498 | forward 1 | TM | |
| 111 | LI:373637.1:2000FEB01 | 434 | 520 | forward 2 | TM | N out |
| 111 | LI:373637.1:2000FEB01 | 866 | 919 | forward 2 | TM | N out |
| 111 | LI:373637.1:2000FEB01 | 423 | 473 | forward 3 | TM | N in |
| 111 | LI:373637.1:2000FEB01 | 867 | 920 | forward 3 | TM | N in |
| 112 | LG:239368.2:2000MAY19 | 241 | 327 | forward 1 | TM | N out |
| 113 | LI:053825.1:2000MAY01 | 31 | 117 | forward 1 | TM | N out |
| 113 | LI:053826.1:2000MAY01 | 1102 | 1188 | forward 1 | TM | N out |
| 113 | LI:053826.1:2000MAY01 | 1282 | 1350 | forward 1 | TM | N out |
| 113 | LI:053826.1:2000MAY01 | 41 | 112 | forward 2 | TM | N out |
| 113 | LI:053826.1:2000MAY01 | 164 | 238 | forward 2 | TM | N out |
| 113 | LI:053826.1:2000MAY01 | 461 | 538 | forward 2 | TM | N out |
| 113 | LI:053826.1:2000MAY01 | 1130 | 1192 | forward 2 | TM | N out |
| 113 | LI:053826.1:2000MAY01 | 1214 | 1276 | forward 2 | TM | N out |
| 113 | LI:053826.1:2000MAY01 | 1307 | 1378 | forward 2 | TM | N out |
| 113 | LI:053826.1:2000MAY01 | 126 | 200 | forward 3 | TM | N in |
| 113 | LI:053826.1:2000MAY01 | 348 | 416 | forward 3 | TM | N in |
| 113 | LI:053826.1:2000MAY01 | 624 | 683 | forward 3 | TM | N in |
| 113 | LI:053826.1:2000MAY01 | 1215 | 1277 | forward 3 | TM | N in |
| 113 | LI:053826.1:2000MAY01 | 1290 | 1352 | forward 3 | TM | N in |
| 115 | LI:1071427.96:2000MAY01 | 1072 | 1140 | forward 1 | TM | |
| 115 | LI:1071427.96:2000MAY01 | 1297 | 1383 | forward 1 | TM | |
| 115 | LI:1071427.96:2000MAY01 | 1459 | 1536 | forward 1 | TM | |
| 115 | LI:1071427.96:2000MAY01 | 1765 | 1851 | forward 1 | TM | |
| 115 | LI:1071427.96:2000MAY01 | 1909 | 1971 | forward 1 | TM | |
| 115 | LI:1071427.96:2000MAY01 | 2002 | 2064 | forward 1 | TM | |
| 115 | LI:1071427.96:2000MAY01 | 1562 | 1648 | forward 2 | TM | N out |
| 115 | LI:1071427.96:2000MAY01 | 1706 | 1792 | forward 2 | TM | N out |
| 115 | LI:1071427.96:2000MAY01 | 1823 | 1885 | forward 2 | TM | N out |
| 115 | LI:1071427.96:2000MAY01 | 1913 | 1975 | forward 2 | TM | N out |
| 115 | LI:1071427.96:2000MAY01 | 2045 | 2098 | forward 2 | TM | N out |
| 115 | LI:1071427.96:2000MAY01 | 384 | 470 | forward 3 | TM | N out |
| 115 | LI:1071427.96:2000MAY01 | 840 | 926 | forward 3 | TM | N out |
| 115 | LI:1071427.96:2000MAY01 | 987 | 1049 | forward 3 | TM | N out |
| 115 | LI:1071427.96:2000MAY01 | 1092 | 1154 | forward 3 | TM | N out |
| 115 | LI:1071427.96:2000MAY01 | 1383 | 1454 | forward 3 | TM | N out |
| 115 | LI:1071427.96:2000MAY01 | 1599 | 1655 | forward 3 | TM | N out |
| 115 | LI:1071427.96:2000MAY01 | 1767 | 1844 | forward 3 | TM | N out |
| 115 | LI:1071427.96:2000MAY01 | 1884 | 1952 | forward 3 | TM | N out |
| 115 | LI:1071427.96:2000MAY01 | 2013 | 2099 | forward 3 | TM | N out |
| 115 | LI:1071427.96:2000MAY01 | 2127 | 2189 | forward 3 | TM | N out |
| 116 | LI:336338.8:2000MAY01 | 100 | 186 | forward 1 | TM | N out |
| 116 | LI:336338.8:2000MAY01 | 427 | 513 | forward 1 | TM | N out |
| 116 | LI:336338.8:2000MAY01 | 110 | 196 | forward 2 | TM | |
| 116 | LI:336338.8:2000MAY01 | 281 | 367 | forward 2 | TM | |
| 116 | LI:336338.8:2000MAY01 | 422 | 508 | forward 2 | TM | |
| 116 | LI:336338.8:2000MAY01 | 354 | 416 | forward 3 | TM | N out |
| 116 | LI:336338.8:2000MAY01 | 432 | 494 | forward 3 | TM | N out |
| 117 | LG:345527.1:2000FEB18 | 46 | 120 | forward 1 | TM | N out |
| 117 | LG:345527.1:2000FEB18 | 917 | 979 | forward 2 | TM | N out |
| 117 | LG:345527.1:2000FEB18 | 1010 | 1072 | forward 2 | TM | N out |
| 117 | LG:345527.1:2000FEB18 | 1112 | 1198 | forward 2 | TM | N out |
| 117 | LG:345527.1:2000FEB18 | 96 | 182 | forward 3 | TM | N out |
| 117 | LG:345527.1:2000FEB18 | 474 | 536 | forward 3 | TM | N out |
| 117 | LG:345527.1:2000FEB18 | 552 | 614 | forward 3 | TM | N out |
| 118 | LG:1089383.1:2000FEB18 | 43 | 126 | forward 1 | TM | N out |
| 118 | LG:1089383.1:2000FEB18 | 14 | 100 | forward 2 | TM | |
| 118 | LG:1089383.1:2000FEB18 | 140 | 205 | forward 2 | TM | |
| 118 | LG:1089383.1:2000FEB18 | 12 | 59 | forward 3 | TM | N out |
| 120 | LG:1093216.1:2000FEB18 | 31 | 117 | forward 1 | TM | N out |
| 120 | LG:1093216.1:2000FEB18 | 151 | 234 | forward 1 | TM | N out |
| 120 | LG:1093216.1:2000FEB18 | 283 | 348 | forward 1 | TM | N out |
| 120 | LG:1093216.1:2000FEB18 | 23 | 109 | forward 2 | TM | N in |
| 120 | LG:1093216.1:2000FEB18 | 143 | 193 | forward 2 | TM | N in |
| 120 | LG:1093216.1:2000FEB18 | 48 | 122 | forward 3 | TM | N out |
| 120 | LG:1093216.1:2000FEB18 | 180 | 263 | forward 3 | TM | N out |
| 122 | LI:335671.2:2000FEB01 | 22 | 108 | forward 1 | TM | N out |
| 122 | LI:335671.2:2000FEB01 | 1048 | 1134 | forward 1 | TM | N out |
| 122 | LI:335671.2:2000FEB01 | 854 | 916 | forward 2 | TM | N in |
| 122 | LI:335671.2:2000FEB01 | 926 | 988 | forward 2 | TM | N in |
| 122 | LI:335671.2:2000FEB01 | 998 | 1072 | forward 2 | TM | N in |
| 122 | LI:335671.2:2000FEB01 | 399 | 461 | forward 3 | TM | N out |
| 122 | LI:335671.2:2000FEB01 | 480 | 542 | forward 3 | TM | N out |
| 122 | LI:335671.2:2000FEB01 | 576 | 662 | forward 3 | TM | N out |
| 122 | LI:335671.2:2000FEB01 | 1023 | 1085 | forward 3 | TM | N out |
| 122 | LI:335671.2:2000FEB01 | 1098 | 1160 | forward 3 | TM | N out |
| 122 | LI:335671.2:2000FEB01 | 1173 | 1235 | forward 3 | TM | N out |
| 123 | LI:793758.1:2000FEB01 | 31 | 117 | forward 1 | TM | N out |
| 123 | LI:793758.1:2000FEB01 | 151 | 234 | forward 1 | TM | N out |
| 123 | LI:793758.1:2000FEB01 | 283 | 348 | forward 1 | TM | N out |
| 123 | LI:793758.1:2000FEB01 | 23 | 109 | forward 2 | TM | N in |
| 123 | LI:793758.1:2000FEB01 | 143 | 193 | forward 2 | TM | N in |
| 123 | LI:793758.1:2000FEB01 | 48 | 122 | forward 3 | TM | N out |
| 123 | LI:793758.1:2000FEB01 | 180 | 263 | forward 3 | TM | N out |
| 124 | LI:803718.1:2000FEB01 | 43 | 126 | forward 1 | TM | N out |
| 124 | LI:803718.1:2000FEB01 | 14 | 100 | forward 2 | TM | |
| 124 | LI:803718.1:2000FEB01 | 140 | 205 | forward 2 | TM | |
| 124 | LI:803718.1:2000FEB01 | 12 | 59 | forward 3 | TM | N out |
| 125 | LI:412179.1:2000FEB01 | 328 | 414 | forward 1 | TM | |
| 125 | LI:412179.1:2000FEB01 | 436 | 504 | forward 1 | TM | |
| 125 | LI:412179.1:2000FEB01 | 56 | 115 | forward 2 | TM | N out |
| 125 | LI:412179.1:2000FEB01 | 413 | 475 | forward 2 | TM | N out |
| 125 | LI:412179.1:2000FEB01 | 512 | 574 | forward 2 | TM | N out |
| 125 | LI:412179.1:2000FEB01 | 96 | 176 | forward 3 | TM | N out |
| 125 | LI:412179.1:2000FEB01 | 384 | 446 | forward 3 | TM | N out |
| 125 | LI:412179.1:2000FEB01 | 462 | 524 | forward 3 | TM | N out |
| 126 | LI:815679.1:2000FEB01 | 10 | 84 | forward 1 | TM | N out |
| 126 | LI:815679.1:2000FEB01 | 313 | 399 | forward 1 | TM | N out |
| 126 | LI:815679.1:2000FEB01 | 946 | 1032 | forward 1 | TM | N out |
| 126 | LI:815679.1:2000FEB01 | 1171 | 1248 | forward 1 | TM | N out |
| 126 | LI:815679.1:2000FEB01 | 323 | 409 | forward 2 | TM | N in |
| 126 | LI:815679.1:2000FEB01 | 500 | 568 | forward 2 | TM | N in |
| 126 | LI:815679.1:2000FEB01 | 971 | 1021 | forward 2 | TM | N in |
| 126 | LI:815679.1:2000FEB01 | 1493 | 1561 | forward 2 | TM | N in |
| 126 | LI:815679.1:2000FEB01 | 15 | 92 | forward 3 | TM | N in |
| 126 | LI:815679.1:2000FEB01 | 285 | 356 | forward 3 | TM | N in |
| 126 | LI:815679.1:2000FEB01 | 690 | 764 | forward 3 | TM | N in |
| 126 | LI:815679.1:2000FEB01 | 993 | 1076 | forward 3 | TM | N in |
| 126 | LI:815679.1:2000FEB01 | 1626 | 1712 | forward 3 | TM | N in |
| 127 | LI:481361.3:2000FEB01 | 199 | 252 | forward 1 | TM | N out |
| 128 | LG:247388.1:2000MAY19 | 190 | 240 | forward 1 | TM | N out |
| 128 | LG:247388.1:2000MAY19 | 233 | 319 | forward 2 | TM | N out |
| 128 | LG:247388.1:2000MAY19 | 446 | 532 | forward 2 | TM | N out |
| 130 | LI:787618.1:2000MAY01 | 10 | 84 | forward 1 | TM | N in |
| 130 | LI:787618.1:2000MAY01 | 313 | 399 | forward 1 | TM | N in |
| 130 | LI:787618.1:2000MAY01 | 679 | 750 | forward 1 | TM | N in |
| 130 | LI:787618.1:2000MAY01 | 1018 | 1098 | forward 1 | TM | N in |
| 130 | LI:787618.1:2000MAY01 | 1189 | 1266 | forward 1 | TM | N in |
| 130 | LI:787618.1:2000MAY01 | 323 | 409 | forward 2 | TM | N out |
| 130 | LI:787618.1:2000MAY01 | 500 | 568 | forward 2 | TM | N out |
| 130 | LI:787618.1:2000MAY01 | 944 | 1030 | forward 2 | TM | N out |
| 130 | LI:787618.1:2000MAY01 | 1508 | 1582 | forward 2 | TM | N out |
| 130 | LI:787618.1:2000MAY01 | 1616 | 1702 | forward 2 | TM | N out |
| 130 | LI:787618.1:2000MAY01 | 15 | 92 | forward 3 | TM | N out |
| 130 | LI:787618.1:2000MAY01 | 285 | 356 | forward 3 | TM | N out |
| 131 | LI:331610.2:2000MAY01 | 91 | 156 | forward 1 | TM | |
| 131 | LI:331610.2:2000MAY01 | 277 | 363 | forward 1 | TM | |
| 131 | LI:331610.2:2000MAY01 | 682 | 744 | forward 1 | TM | |
| 131 | LI:331610.2:2000MAY01 | 4126 | 4212 | forward 1 | TM | |
| 131 | LI:331610.2:2000MAY01 | 4951 | 5001 | forward 1 | TM | |
| 131 | LI:331610.2:2000MAY01 | 5023 | 5109 | forward 1 | TM | |
| 131 | LI:331610.2:2000MAY01 | 5128 | 5190 | forward 1 | TM | |
| 131 | LI:331610.2:2000MAY01 | 5407 | 5469 | forward 1 | TM | |
| 131 | LI:331610.2:2000MAY01 | 5485 | 5547 | forward 1 | TM | |
| 131 | LI:331610.2:2000MAY01 | 5563 | 5625 | forward 1 | TM | |
| 131 | LI:331610.2:2000MAY01 | 5728 | 5805 | forward 1 | TM | |
| 131 | LI:331610.2:2000MAY01 | 5896 | 5949 | forward 1 | RTM | |
| 131 | LI:331610.2:2000MAY01 | 6268 | 6327 | forward 1 | TM | |
| 131 | LI:331610.2:2000MAY01 | 6454 | 6522 | forward 1 | TM | |
| 131 | LI:331610.2:2000MAY01 | 6559 | 6645 | forward 1 | TM | |
| 131 | LI:331610.2:2000MAY01 | 7477 | 7539 | forward 1 | TM | |
| 131 | LI:331610.2:2000MAY01 | 7552 | 7614 | forward 1 | TM | |
| 131 | LI:331610.2:2000MAY01 | 671 | 724 | forward 2 | TM | N out |
| 131 | LI:331610.2:2000MAY01 | 4127 | 4213 | forward 2 | TM | N out |
| 131 | LI:331610.2:2000MAY01 | 4928 | 5011 | forward 2 | TM | N out |
| 131 | LI:331610.2:2000MAY01 | 5051 | 5113 | forward 2 | TM | N out |
| 131 | LI:331610.2:2000MAY01 | 5135 | 5197 | forward 2 | TM | N out |
| 131 | LI:331610.2:2000MAY01 | 5207 | 5269 | forward 2 | TM | N out |
| 131 | LI:331610.2:2000MAY01 | 5537 | 5611 | forward 2 | TM | N out |
| 131 | LI:331610.2:2000MAY01 | 5726 | 5797 | forward 2 | TM | N out |
| 131 | LI:331610.2:2000MAY01 | 5903 | 5989 | forward 2 | TM | N out |
| 131 | LI:331610.2:2000MAY01 | 6392 | 6478 | forward 2 | TM | N out |
| 131 | LI:331610.2:2000MAY01 | 6746 | 6814 | forward 2 | TM | N out |
| 131 | LI:331610.2:2000MAY01 | 7295 | 7381 | forward 2 | TM | N out |
| 131 | LI:331610.2:2000MAY01 | 7586 | 7633 | forward 2 | TM | N out |
| 131 | LI:331610.2:2000MAY01 | 2763 | 2849 | forward 3 | TM | |
| 131 | LI:331610.2:2000MAY01 | 4527 | 4595 | forward 3 | TM | |
| 131 | LI:331610.2:2000MAY01 | 5079 | 5165 | forward 3 | TM | |
| 131 | LI:331610.2:2000MAY01 | 5445 | 5516 | forward 3 | TM | |
| 131 | LI:331610.2:2000MAY01 | 5676 | 5759 | forward 3 | TM | |
| 131 | LI:331610.2:2000MAY01 | 6255 | 6341 | forward 3 | TM | |
| 131 | LI:331610.2:2000MAY01 | 6378 | 6464 | forward 3 | TM | |
| 131 | LI:331610.2:2000MAY01 | 6624 | 6692 | forward 3 | TM | |
| 131 | LI:331610.2:2000MAY01 | 6705 | 6779 | forward 3 | TM | |
| 131 | LI:331610.2:2000MAY01 | 6810 | 6884 | forward 3 | TM | |
| 131 | LI:331610.2:2000MAY01 | 7062 | 7133 | forward 3 | TM | |
| 131 | LI:331610.2:2000MAY01 | 7677 | 7748 | forward 3 | TM | |
| 131 | LI:331610.2:2000MAY01 | 7833 | 7919 | forward 3 | TM | |
| 132 | LG:982697.1:2000FEB18 | 355 | 441 | forward 1 | TM | N in |
| 132 | LG:982697.1:2000FEB18 | 946 | 993 | forward 1 | TM | N in |
| 132 | LG:982697.1:2000FEB18 | 897 | 983 | forward 3 | TM | N in |
| 132 | LG:982697.1:2000FEB18 | 1215 | 1301 | forward 3 | TM | N in |
| 133 | LG:1080896.1:2000FEB18 | 367 | 426 | forward 1 | TM | N in |
| 133 | LG:1080896.1:2000FEB18 | 476 | 562 | forward 2 | TM | N in |
| 133 | LG:1080896.1:2000FEB18 | 815 | 901 | forward 2 | TM | N in |
| 133 | LG:1080896.1:2000FEB18 | 342 | 395 | forward 3 | TM | N in |
| 134 | LI:811341.1:2000FEB01 | 562 | 615 | forward 1 | TM | N out |
| 134 | LI:811341.1:2000FEB01 | 691 | 777 | forward 1 | TM | N out |
| 135 | LI:903225.1:2000FEB01 | 20 | 100 | forward 2 | TM | N out |
| 135 | LI:903225.1:2000FEB01 | 12 | 83 | forward 3 | TM | N out |
| 135 | LI:903225.1:2000FEB01 | 768 | 827 | forward 3 | TM | N out |
| 137 | LG:979580.1:2000MAY19 | 298 | 354 | forward 1 | TM | N in |
| 137 | LG:979580.1:2000MAY19 | 826 | 909 | forward 1 | TM | N in |
| 137 | LG:979580.1:2000MAY19 | 934 | 1020 | forward 1 | TM | N in |
| 137 | LG:979580.1:2000MAY19 | 233 | 289 | forward 2 | TM | N out |
| 137 | LG:979580.1:2000MAY19 | 338 | 418 | forward 2 | TM | N out |
| 137 | LG:979580.1:2000MAY19 | 201 | 272 | forward 3 | TM | N in |
| 138 | LI:1169865.1:2000MAY01 | 197 | 283 | forward 2 | TM | N in |
| 138 | LI:1169865.1:2000MAY01 | 863 | 949 | forward 2 | TM | N in |
| 139 | LG:337818.2:2000FEB18 | 40 | 117 | forward 1 | TM | N out |
| 139 | LG:337818.2:2000FEB18 | 532 | 618 | forward 1 | TM | N out |
| 139 | LG:337818.2:2000FEB18 | 907 | 993 | forward 1 | TM | N out |
| 139 | LG:337818.2:2000FEB18 | 1372 | 1425 | forward 1 | TM | N out |
| 140 | LI:337818.1:2000FEB01 | 40 | 114 | forward 1 | TM | N in |
| 140 | LI:337818.1:2000FEB01 | 401 | 466 | forward 2 | TM | N in |
| 140 | LI:337818.1:2000FEB01 | 852 | 905 | forward 3 | TM | N in |
| 141 | LG:241577.4:2000MAY19 | 496 | 582 | forward 1 | TM | N in |
| 142 | LG:344786.4:2000MAY19 | 19 | 105 | forward 1 | TM | N out |
| 142 | LG:344786.4:2000MAY19 | 14 | 88 | forward 2 | TM | N in |
| 142 | LG:344786.4:2000MAY19 | 173 | 247 | forward 2 | TM | N in |
| 142 | LG:344786.4:2000MAY19 | 21 | 107 | forward 3 | TM | |
| 143 | LI:414307.1:2000FEB01 | 116 | 202 | forward 2 | TM | N in |
| 144 | LI:202943.2:2000FEB01 | 166 | 237 | forward 1 | TM | N in |
| 144 | LI:202943.2:2000FEB01 | 263 | 313 | forward 2 | TM | N out |
| 144 | LI:202943.2:2000FEB01 | 276 | 326 | forward 3 | TM | N in |
| 146 | LI:815961.1:2000FEB01 | 232 | 291 | forward 1 | TM | N out |
| 146 | LI:815961.1:2000FEB01 | 81 | 167 | forward 3 | TM | N out |
| 146 | LI:815961.1:2000FEB01 | 243 | 329 | forward 3 | TM | N out |
| 146 | LI:815961.1:2000FEB01 | 354 | 422 | forward 3 | TM | N out |
| 146 | LI:815961.1:2000FEB01 | 573 | 659 | forward 3 | TM | N out |
| 146 | LI:815961.1:2000FEB01 | 741 | 803 | forward 3 | TM | N out |
| 147 | LG:120744.1:2000MAY19 | 181 | 249 | forward 1 | TM | N out |
| 147 | LG:120744.1:2000MAY19 | 188 | 256 | forward 2 | TM | |
| 147 | LG:120744.1:2000MAY19 | 275 | 328 | forward 2 | TM | |
| 148 | LI:757520.1:2000MAY01 | 2140 | 2220 | forward 1 | TM | N in |
| 148 | LI:757520.1:2000MAY01 | 2293 | 2379 | forward 1 | TM | N in |
| 148 | LI:757520.1:2000MAY01 | 1988 | 2059 | forward 2 | TM | N in |
| 148 | LI:757520.1:2000MAY01 | 2285 | 2359 | forward 2 | TM | N in |
| 148 | LI:757520.1:2000MAY01 | 1677 | 1763 | forward 3 | TM | |
| 148 | LI:757520.1:2000MAY01 | 1995 | 2066 | forward 3 | TM | |
| 149 | LG:160570.1:2000FEB18 | 345 | 413 | forward 3 | TM | N out |
| 149 | LG:160570.1:2000FEB18 | 462 | 518 | forward 3 | TM | N out |
| 151 | LI:221285.1:2000FEB01 | 1375 | 1452 | forward 1 | TM | N out |
| 152 | LI:401605.2:2000FEB01 | 235 | 321 | forward 1 | TM | N in |
| 152 | LI:401605.2:2000FEB01 | 192 | 263 | forward 3 | TM | N in |
| 152 | LI:401605.2:2000FEB01 | 489 | 563 | forward 3 | TM | N in |
| 153 | LI:329017.1:2000FEB01 | 179 | 235 | forward 2 | TM | N in |
| 153 | LI:329017.1:2000FEB01 | 359 | 433 | forward 2 | TM | N in |
| 153 | LI:329017.1:2000FEB01 | 449 | 526 | forward 2 | TM | N in |
| 153 | LI:329017.1:2000FEB01 | 617 | 703 | forward 2 | TM | N in |
| 153 | LI:329017.1:2000FEB01 | 920 | 973 | forward 2 | TM | N in |
| 155 | LG:403409.1:2000MAY19 | 136 | 222 | forward 1 | TM | N out |
| 155 | LG:403409.1:2000MAY19 | 973 | 1029 | forward 1 | TM | N out |
| 155 | LG:403409.1:2000MAY19 | 1285 | 1371 | forward 1 | TM | N out |
| 155 | LG:403409.1:2000MAY19 | 182 | 268 | forward 2 | TM | N in |
| 156 | LG:233933.5:2000MAY19 | 148 | 234 | forward 1 | TM | N out |
| 156 | LG:233933.5:2000MAY19 | 39 | 125 | forward 3 | TM | N out |
| 157 | LI:290344.1:2000MAY01 | 232 | 312 | forward 1 | TM | N out |
| 157 | LI:290344.1:2000MAY01 | 1258 | 1311 | forward 1 | TM | N out |
| 157 | LI:290344.1:2000MAY01 | 3640 | 3714 | forward 1 | TM | N out |
| 157 | LI:290344.1:2000MAY01 | 4366 | 4449 | forward 1 | TM | N out |
| 157 | LI:290344.1:2000MAY01 | 4468 | 4548 | forward 1 | TM | N out |
| 157 | LI:290344.1:2000MAY01 | 146 | 226 | forward 2 | TM | N out |
| 157 | LI:290344.1:2000MAY01 | 3122 | 3196 | forward 2 | TM | N out |
| 157 | LI:290344.1:2000MAY01 | 3833 | 3919 | forward 2 | TM | N out |
| 157 | LI:290344.1:2000MAY01 | 4457 | 4537 | forward 2 | TM | N out |
| 157 | LI:290344.1:2000MAY01 | 4760 | 4846 | forward 2 | TM | N out |
| 157 | LI:290344.1:2000MAY01 | 432 | 503 | forward 3 | TM | N out |
| 157 | LI:290344.1:2000MAY01 | 1647 | 1733 | forward 3 | TM | N out |
| 157 | LI:290344.1:2000MAY01 | 3177 | 3248 | forward 3 | TM | N out |
| 157 | LI:290344.1:2000MAY01 | 3594 | 3680 | forward 3 | TM | N out |
| 157 | LI:290344.1:2000MAY01 | 3753 | 3815 | forward 3 | TM | N out |
| 157 | LI:290344.1:2000MAY01 | 3864 | 3926 | forward 3 | TM | N out |
| 157 | LI:290344.1:2000MAY01 | 4443 | 4526 | forward 3 | TM | N out |
| 158 | LI:410742.1:2000MAY01 | 136 | 210 | forward 1 | TM | N out |
| 158 | LI:410742.1:2000MAY01 | 2200 | 2286 | forward 1 | TM | N out |
| 158 | LI:410742.1:2000MAY01 | 2437 | 2514 | forward 1 | TM | N out |
| 158 | LI:410742.1:2000MAY01 | 3149 | 3229 | forward 2 | TM | N in |
| 158 | LI:410742.1:2000MAY01 | 3437 | 3505 | forward 2 | TM | N in |
| 158 | LI:410742.1:2000MAY01 | 510 | 578 | forward 3 | TM | N in |
| 158 | LI:410742.1:2000MAY01 | 1905 | 1991 | forward 3 | TM | N in |
| 158 | LI:410742.1:2000MAY01 | 2811 | 2897 | forward 3 | TM | N in |
| 158 | LI:410742.1:2000MAY01 | 3168 | 3254 | forward 3 | TM | N in |
| 159 | LG:406568.1:2000MAY19 | 490 | 549 | forward 1 | TM | N in |
| 159 | LG:406568.1:2000MAY19 | 1732 | 1818 | forward 1 | TM | N in |
| 159 | LG:406568.1:2000MAY19 | 1825 | 1899 | forward 1 | TM | N in |
| 159 | LG:406568.1:2000MAY19 | 1918 | 2004 | forward 1 | TM | N in |
| 159 | LG:406568.1:2000MAY19 | 12 | 59 | forward 3 | TM | N in |
| 159 | LG:406568.1:2000MAY19 | 1935 | 2018 | forward 3 | TM | N in |
| 159 | LG:406568.1:2000MAY19 | 2094 | 2174 | forward 3 | TM | N in |
| 160 | LI:283762.1:2000MAY01 | 1675 | 1746 | forward 1 | TM | |
| 160 | LI:283762.1:2000MAY01 | 2095 | 2181 | forward 1 | TM | |
| 160 | LI:283762.1:2000MAY01 | 2632 | 2718 | forward 1 | TM | |
| 160 | LI:283762.1:2000MAY01 | 2830 | 2916 | forward 1 | TM | |
| 160 | LI:283762.1:2000MAY01 | 2941 | 3027 | forward 1 | TM | |
| 160 | LI:283762.1:2000MAY01 | 3235 | 3321 | forward 1 | TM | |
| 160 | LI:283762.1:2000MAY01 | 3328 | 3414 | forward 1 | TM | |
| 160 | LI:283762.1:2000MAY01 | 3592 | 3666 | forward 1 | TM | |
| 160 | LI:283762.1:2000MAY01 | 3682 | 3768 | forward 1 | TM | |
| 160 | LI:283762.1:2000MAY01 | 4153 | 4224 | forward 1 | TM | |
| 160 | LI:283762.1:2000MAY01 | 4360 | 4434 | forward 1 | TM | |
| 160 | LI:283762.1:2000MAY01 | 4594 | 4656 | forward 1 | TM | |
| 160 | LI:283762.1:2000MAY01 | 4681 | 4743 | forward 1 | TM | |
| 160 | LI:283762.1:2000MAY01 | 4885 | 4962 | forward 1 | TM | |
| 160 | LI:283762.1:2000MAY01 | 5011 | 5061 | forward 1 | TM | |
| 160 | LI:283762.1:2000MAY01 | 92 | 178 | forward 2 | TM | N in |
| 160 | LI:283762.1:2000MAY01 | 278 | 364 | forward 2 | TM | N in |
| 160 | LI:283762.1:2000MAY01 | 995 | 1075 | forward 2 | TM | N in |
| 160 | LI:283762.1:2000MAY01 | 1523 | 1597 | forward 2 | TM | N in |
| 160 | LI:283762.1:2000MAY01 | 1817 | 1903 | forward 2 | TM | N in |
| 160 | LI:283762.1:2000MAY01 | 2522 | 2599 | forward 2 | TM | N in |
| 160 | LI:283762.1:2000MAY01 | 2666 | 2752 | forward 2 | TM | N in |
| 160 | LI:283762.1:2000MAY01 | 2837 | 2887 | forward 2 | TM | N in |
| 160 | LI:283762.1:2000MAY01 | 3038 | 3097 | forward 2 | TM | N in |
| 160 | LI:283762.1:2000MAY01 | 3563 | 3625 | forward 2 | TM | N in |
| 160 | LI:283762.1:2000MAY01 | 3638 | 3700 | forward 2 | TM | N in |
| 160 | LI:283762.1:2000MAY01 | 4067 | 4144 | forward 2 | TM | N in |
| 160 | LI:283762.1:2000MAY01 | 4439 | 4522 | forward 2 | TM | N in |
| 160 | LI:283762.1:2000MAY01 | 4685 | 4765 | forward 2 | TM | N in |
| 160 | LI:283762.1:2000MAY01 | 4784 | 4843 | forward 2 | TM | N in |
| 160 | LI:283762.1:2000MAY01 | 4973 | 5050 | forward 2 | TM | N in |
| 160 | LI:283762.1:2000MAY01 | 5072 | 5125 | forward 2 | TM | N in |
| 160 | LI:283762.1:2000MAY01 | 693 | 755 | forward 3 | TM | N out |
| 160 | LI:283762.1:2000MAY01 | 765 | 827 | forward 3 | TM | N out |
| 160 | LI:283762.1:2000MAY01 | 840 | 902 | forward 3 | TM | N out |
| 160 | LI:283762.1:2000MAY01 | 1623 | 1694 | forward 3 | TM | N out |
| 160 | LI:283762.1:2000MAY01 | 1800 | 1880 | forward 3 | TM | N out |
| 160 | LI:283762.1:2000MAY01 | 2622 | 2708 | forward 3 | TM | N out |
| 160 | LI:283762.1:2000MAY01 | 2778 | 2861 | forward 3 | TM | N out |
| 160 | LI:283762.1:2000MAY01 | 3144 | 3230 | forward 3 | TM | N out |
| 160 | LI:283762.1:2000MAY01 | 3276 | 3362 | forward 3 | TM | N out |
| 160 | LI:283762.1:2000MAY01 | 3441 | 3527 | forward 3 | TM | N out |
| 160 | LI:283762.1:2000MAY01 | 3666 | 3752 | forward 3 | TM | N out |
| 160 | LI:283762.1:2000MAY01 | 4077 | 4163 | forward 3 | TM | N out |
| 160 | LI:283762.1:2000MAY01 | 4245 | 4331 | forward 3 | TM | N out |
| 160 | LI:283762.1:2000MAY01 | 4395 | 4481 | forward 3 | TM | N out |
| 160 | LI:283762.1:2000MAY01 | 4584 | 4646 | forward 3 | TM | N out |
| 160 | LI:283762.1:2000MAY01 | 4662 | 4724 | forward 3 | TM | N out |
| 160 | LI:283762.1:2000MAY01 | 4845 | 4892 | forward 3 | TM | N out |
| 161 | LI:347687.113:2000MAY01 | 319 | 405 | forward 1 | TM | N out |
| 161 | LI:347687.113:2000MAY01 | 463 | 549 | forward 1 | TM | N out |
| 161 | LI:347687.113:2000MAY01 | 733 | 819 | forward 1 | TM | N out |
| 161 | LI:347687.113:2000MAY01 | 1240 | 1293 | forward 1 | TM | N out |
| 161 | LI:347687.113:2000MAY01 | 1720 | 1797 | forward 1 | TM | N out |
| 161 | LI:347687.113:2000MAY01 | 1861 | 1908 | forward 1 | TM | N out |
| 161 | LI:347687.113:2000MAY01 | 1972 | 2034 | forward 1 | TM | N out |
| 161 | LI:347687.113:2000MAY01 | 2050 | 2112 | forward 1 | TM | N out |
| 161 | LI:347687.113:2000MAY01 | 2308 | 2394 | forward 1 | TM | N out |
| 161 | LI:347687.113:2000MAY01 | 977 | 1057 | forward 2 | TM | N in |
| 161 | LI:347687.113:2000MAY01 | 1250 | 1309 | forward 2 | TM | N in |
| 161 | LI:347687.113:2000MAY01 | 1730 | 1792 | forward 2 | TM | N in |
| 161 | LI:347687.113:2000MAY01 | 1808 | 1870 | forward 2 | TM | N in |
| 161 | LI:347687.113:2000MAY01 | 1886 | 1948 | forward 2 | TM | N in |
| 161 | LI:347687.113:2000MAY01 | 324 | 398 | forward 3 | TM | N in |
| 161 | LI:347687.113:2000MAY01 | 948 | 1034 | forward 3 | TM | N in |
| 161 | LI:347687.113:2000MAY01 | 1686 | 1763 | forward 3 | TM | N in |
| 161 | LI:347687.113:2000MAY01 | 1791 | 1874 | forward 3 | TM | N in |
| 161 | LI:347687.113:2000MAY01 | 2025 | 2108 | forward 3 | TM | N in |
| 163 | LG:451710.1:2000FEB18 | 502 | 588 | forward 1 | TM | N in |
| 163 | LG:451710.1:2000FEB18 | 453 | 515 | forward 3 | TM | N in |
| 164 | LG:455771.1:2000FEB18 | 199 | 285 | forward 1 | TM | N out |
| 165 | LG:452089.1:2000FEB18 | 695 | 772 | forward 2 | TM | N out |
| 165 | LG:452089.1:2000FEB18 | 708 | 764 | forward 3 | TM | N out |
| 166 | LG:246415.1:2000FEB18 | 196 | 246 | forward 1 | TM | N in |
| 167 | LG:414144.10:2000FEB18 | 589 | 672 | forward 1 | TM | N in |
| 167 | LG:414144.10:2000FEB18 | 615 | 692 | forward 3 | TM | N out |
| 168 | LG:1101445.1:2000FEB18 | 787 | 858 | forward 1 | TM | N out |
| 168 | LG:1101445.1:2000FEB18 | 506 | 592 | forward 2 | TM | N out |
| 169 | LG:452134.1:2000FEB18 | 276 | 326 | forward 3 | TM | N out |
| 170 | LI:903021.1:2000FEB01 | 109 | 162 | forward 1 | TM | N out |
| 172 | LG:449404.1:2000MAY19 | 163 | 219 | forward 1 | TM | N out |
| 172 | LG:449404.1:2000MAY19 | 200 | 280 | forward 2 | TM | N out |
| 173 | LG:449413.1:2000MAY19 | 353 | 439 | forward 2 | TM | N out |
| 177 | LG:1101153.1:2000MAY19 | 520 | 600 | forward 1 | TM | N in |
| 177 | LG:1101153.1:2000MAY19 | 585 | 671 | forward 3 | TM | N in |
| 178 | LI:257695.20:2000MAY01 | 433 | 516 | forward 1 | TM | N in |
| 179 | LI:455771.1:2000MAY01 | 199 | 285 | forward 1 | TM | N out |
| 180 | LI:274551.1:2000MAY01 | 81 | 152 | forward 3 | TM | N out |
| 180 | LI:274551.1:2000MAY01 | 216 | 269 | forward 3 | TM | N out |
| 181 | LI:035973.1:2000MAY01 | 622 | 708 | forward 1 | TM | N out |
| 181 | LI:035973.1:2000MAY01 | 596 | 682 | forward 2 | TM | N out |
| 181 | LI:035973.1:2000MAY01 | 588 | 674 | forward 3 | TM | N out |
| 182 | LG:978427.5:2000FEB18 | 221 | 295 | forward 2 | TM | N out |
| 182 | LG:978427.5:2000FEB18 | 365 | 433 | forward 2 | TM | N out |
| 182 | LG:978427.5:2000FEB18 | 198 | 284 | forward 3 | TM | N out |
| 183 | LG:247781.2:2000FEB18 | 22 | 108 | forward 1 | TM | N in |
| 183 | LG:247781.2:2000FEB18 | 1114 | 1200 | forward 1 | TM | N in |
| 183 | LG:247781.2:2000FEB18 | 1149 | 1235 | forward 3 | TM | N in |
| 185 | LI:333307.2:2000FEB01 | 24 | 98 | forward 3 | TM | N out |
| 187 | LG:414732.1:2000MAY19 | 40 | 93 | forward 1 | TM | N out |
| 187 | LG:414732.1:2000MAY19 | 156 | 233 | forward 3 | TM | N out |
| 188 | LG:413910.6:2000MAY19 | 385 | 441 | forward 1 | TM | N out |
| 188 | LG:413910.6:2000MAY19 | 886 | 948 | forward 1 | TM | N out |
| 188 | LG:413910.6.2000MAY19 | 104 | 190 | forward 2 | TM | N out |
| 188 | LG:413910.6:2000MAY19 | 387 | 461 | forward 3 | TM | N out |
| 188 | LG:413910.6:2000MAY19 | 921 | 1007 | forward 3 | TM | N out |
| 189 | LI:414732.2:2000MAY01 | 34 | 93 | forward 1 | TM | N out |
| 189 | LI:414732.2:2000MAY01 | 24 | 110 | forward 3 | TM | N out |
| 189 | LI:414732.2:2000MAY01 | 159 | 236 | forward 3 | TM | N out |
| 190 | LI:900264.2:2000MAY01 | 730 | 807 | forward 1 | TM | N in |
| 190 | LI:900264.2:2000MAY01 | 1018 | 1092 | forward 1 | TM | N in |
| 190 | LI:900264.2:2000MAY01 | 1294 | 1350 | forward 1 | TM | N in |
| 190 | LI:900264.2:2000MAY01 | 1519 | 1578 | forward 1 | TM | N in |
| 190 | LI:900264.2:2000MAY01 | 2311 | 2397 | forward 1 | TM | N in |
| 190 | LI:900264.2:2000MAY01 | 2509 | 2562 | forward 1 | TM | N in |
| 190 | LI:900264.2:2000MAY01 | 2752 | 2808 | forward 1 | TM | N in |
| 190 | LI:900264.2:2000MAY01 | 3103 | 3165 | forward 1 | TM | N in |
| 190 | LI:900264.2:2000MAY01 | 3178 | 3240 | forward 1 | TM | N in |
| 190 | LI:900264.2:2000MAY01 | 3253 | 3315 | forward 1 | TM | N in |
| 190 | LI:900264.2:2000MAY01 | 3424 | 3510 | forward 1 | TM | N in |
| 190 | LI:900264.2:2000MAY01 | 3520 | 3603 | forward 1 | TM | N in |
| 190 | LI:900264.2:2000MAY01 | 3883 | 3945 | forward 1 | TM | N in |
| 190 | LI:900264.2:2000MAY01 | 3982 | 4044 | forward 1 | TM | N in |
| 190 | LI:900264.2:2000MAY01 | 68 | 154 | forward 2 | TM | |
| 190 | LI:900264.2:2000MAY01 | 188 | 274 | forward 2 | TM | |
| 190 | LI:900264.2:2000MAY01 | 1079 | 1165 | forward 2 | TM | |
| 190 | LI:900264.2:2000MAY01 | 2285 | 2359 | forward 2 | TM | |
| 190 | LI:900264.2:2000MAY01 | 2732 | 2812 | forward 2 | TM | |
| 190 | LI:900264.2:2000MAY01 | 3095 | 3172 | forward 2 | TM | |
| 190 | LI:900264.2:2000MAY01 | 3260 | 3319 | forward 2 | TM | |
| 190 | LI:900264.2:2000MAY01 | 3434 | 3505 | forward 2 | TM | |
| 190 | LI:900264.2:2000MAY01 | 3515 | 3601 | forward 2 | TM | |
| 190 | LI:900264.2:2000MAY01 | 3662 | 3748 | forward 2 | TM | |
| 190 | LI:900264.2:2000MAY01 | 3842 | 3913 | forward 2 | TM | |
| 190 | LI:900264.2:2000MAY01 | 3992 | 4063 | forward 2 | TM | |
| 190 | LI:900264.2:2000MAY01 | 198 | 248 | forward 3 | TM | N in |
| 190 | LI:900264.2:2000MAY01 | 1080 | 1133 | forward 3 | TM | N in |
| 190 | LI:900264.2:2000MAY01 | 1431 | 1517 | forward 3 | TM | N in |
| 190 | LI:900264.2:2000MAY01 | 1518 | 1571 | forward 3 | TM | N in |
| 190 | LI:900264.2:2000MAY01 | 1740 | 1814 | forward 3 | TM | N in |
| 190 | LI:900264.2:2000MAY01 | 2409 | 2480 | forward 3 | TM | N in |
| 190 | LI:900264.2:2000MAY01 | 2928 | 2993 | forward 3 | TM | N in |
| 190 | LI:900264.2:2000MAY01 | 3096 | 3161 | forward 3 | TM | N in |
| 190 | LI:900264.2:2000MAY01 | 3342 | 3404 | forward 3 | TM | N in |
| 190 | LI:900264.2:2000MAY01 | 3447 | 3509 | forward 3 | TM | N in |
| 190 | LI:900264.2:2000MAY01 | 3531 | 3614 | forward 3 | TM | N in |
| 190 | LI:900264.2:2000MAY01 | 3987 | 4064 | forward 3 | TM | N in |
| 191 | LI:335593.1:2000MAY01 | 685 | 771 | forward 1 | TM | N in |
| 191 | LI:335593.1:2000MAY01 | 1273 | 1335 | forward 1 | TM | N in |
| 191 | LI:335593.1:2000MAY01 | 1366 | 1428 | forward 1 | TM | N in |
| 191 | LI:335593.1:2000MAY01 | 710 | 757 | forward 2 | TM | N in |
| 191 | LI:335593.1:2000MAY01 | 1250 | 1336 | forward 2 | TM | N in |
| 191 | LI:335593.1:2000MAY01 | 1358 | 1408 | forward 2 | TM | N in |
| 191 | LI:335593.1:2000MAY01 | 1448 | 1525 | forward 2 | TM | N in |
| 191 | LI:335593.1:2000MAY01 | 1604 | 1690 | forward 2 | TM | N in |
| 191 | LI:335593.1:2000MAY01 | 81 | 128 | forward 3 | TM | N in |
| 191 | LI:335593.1:2000MAY01 | 246 | 296 | forward 3 | TM | N in |
| 191 | LI:335593.1:2000MAY01 | 807 | 866 | forward 3 | TM | N in |
| 191 | LI:335593.1:2000MAY01 | 876 | 947 | forward 3 | TM | N in |
| 191 | LI:335593.1:2000MAY01 | 1155 | 1217 | forward 3 | TM | N in |
| 191 | LI:335593.1:2000MAY01 | 1233 | 1295 | forward 3 | TM | N in |
| 191 | LI:335593.1:2000MAY01 | 1359 | 1445 | forward 3 | TM | N in |
| 192 | LI:1189543.1:2000MAY01 | 1765 | 1842 | forward 1 | TM | |
| 192 | LI:1189543.1:2000MAY01 | 1861 | 1935 | forward 1 | TM | |
| 192 | LI:1189543.1:2000MAY01 | 2236 | 2307 | forward 1 | TM | |
| 192 | LI:1189543.1:2000MAY01 | 2356 | 2442 | forward 1 | TM | |
| 192 | LI:1189543.1:2000MAY01 | 2476 | 2544 | forward 1 | TM | |
| 192 | LI:1189543.1:2000MAY01 | 2659 | 2712 | forward 1 | TM | |
| 192 | LI:1189543.1:2000MAY01 | 3097 | 3174 | forward 1 | TM | |
| 192 | LI:1189543.1:2000MAY01 | 3217 | 3288 | forward 1 | TM | |
| 192 | LI:1189543.1:2000MAY01 | 3439 | 3492 | forward 1 | TM | |
| 192 | LI:1189543.1:2000MAY01 | 860 | 946 | forward 2 | TM | |
| 192 | LI:1189543.1:2000MAY01 | 1016 | 1099 | forward 2 | TM | |
| 192 | LI:1189543.1:2000MAY01 | 1145 | 1216 | forward 2 | TM | |
| 192 | LI:1189543.1:2000MAY01 | 1601 | 1672 | forward 2 | TM | |
| 192 | LI:1189543.1:2000MAY01 | 1691 | 1768 | forward 2 | TM | |
| 192 | LI:1189543.1:2000MAY01 | 2411 | 2485 | forward 2 | TM | |
| 192 | LI:1189543.1:2000MAY01 | 2831 | 2917 | forward 2 | TM | |
| 192 | LI:1189543.1:2000MAY01 | 3080 | 3166 | forward 2 | TM | |
| 192 | LI:1189543.1:2000MAY01 | 3227 | 3310 | forward 2 | TM | |
| 192 | LI:1189543.1:2000MAY01 | 1155 | 1229 | forward 3 | TM | N out |
| 192 | LI:1189543.1:2000MAY01 | 1683 | 1766 | forward 3 | TM | N out |
| 192 | LI:1189543.1:2000MAY01 | 1770 | 1838 | forward 3 | TM | N out |
| 192 | LI:1189543.1:2000MAY01 | 2019 | 2069 | forward 3 | TM | N out |
| 192 | LI:1189543.1:2000MAY01 | 2352 | 2438 | forward 3 | TM | N out |
| 192 | LI:1189543.1:2000MAY01 | 2508 | 2594 | forward 3 | TM | N out |
| 192 | LI:1189543.1:2000MAY01 | 3030 | 3101 | forward 3 | TM | N out |
| 192 | LI:1189543.1:2000MAY01 | 3183 | 3263 | forward 3 | TM | N out |
| 192 | LI:1189543.1:2000MAY01 | 3360 | 3446 | forward 3 | TM | N out |
| 193 | LG:455450.1:2000FEB18 | 422 | 490 | forward 2 | TM | N out |
| 194 | LG:1040978.1:2000FEB18 | 500 | 586 | forward 2 | TM | N out |
| 194 | LG:1040978.1:2000FEB18 | 276 | 332 | forward 3 | TM | N out |
| 196 | LG:132147.3:2000FEB18 | 259 | 345 | forward 1 | TM | N out |
| 196 | LG:132147.3:2000FEB18 | 418 | 504 | forward 1 | TM | N out |
| 196 | LG:132147.3:2000FEB18 | 718 | 780 | forward 1 | TM | N out |
| 196 | LG:132147.3:2000FEB18 | 1477 | 1548 | forward 1 | TM | N out |
| 196 | LG:132147.3:2000FEB18 | 1585 | 1647 | forward 1 | TM | N out |
| 196 | LG:132147.3:2000FEB18 | 1690 | 1752 | forward 1 | TM | N out |
| 196 | LG:132147.3:2000FEB18 | 2560 | 2637 | forward 1 | TM | N out |
| 196 | LG:132147.3:2000FEB18 | 2731 | 2790 | forward 1 | TM | N out |
| 196 | LG:132147.3:2000FEB18 | 2908 | 2976 | forward 1 | TM | N out |
| 196 | LG:132147.3:2000FEB18 | 3082 | 3168 | forward 1 | TM | N out |
| 196 | LG:132147.3:2000FEB18 | 3184 | 3243 | forward 1 | TM | N out |
| 196 | LG:132147.3:2000FEB18 | 3376 | 3462 | forward 1 | TM | N out |
| 196 | LG:132147.3:2000FEB18 | 1451 | 1531 | forward 2 | TM | N out |
| 196 | LG:132147.3:2000FEB18 | 1538 | 1615 | forward 2 | TM | N out |
| 196 | LG:132147.3:2000FEB18 | 2741 | 2827 | forward 2 | TM | N out |
| 196 | LG:132147.3:2000FEB18 | 2960 | 3031 | forward 2 | TM | N out |
| 196 | LG:132147.3:2000FEB18 | 3050 | 3112 | forward 2 | TM | N out |
| 196 | LG:132147.3:2000FEB18 | 1626 | 1703 | forward 3 | TM | N in |
| 196 | LG:132147.3:2000FEB18 | 2508 | 2594 | forward 3 | TM | N in |
| 196 | LG:132147.3:2000FEB18 | 2919 | 2987 | forward 3 | TM | N in |
| 196 | LG:132147.3:2000FEB18 | 3177 | 3263 | forward 3 | TM | N in |
| 196 | LG:132147.3:2000FEB18 | 3372 | 3422 | forward 3 | TM | N in |
| 197 | LI:036034.1:2000FEB01 | 157 | 219 | forward 1 | TM | N out |
| 197 | LI:036034.1:2000FEB01 | 395 | 457 | forward 2 | TM | N in |
| 197 | LI:036034.1:2000FEB01 | 479 | 541 | forward 2 | TM | N in |
| 197 | LI:036034.1:2000FEB01 | 563 | 625 | forward 2 | TM | N in |
| 197 | LI:036034.1:2000FEB01 | 647 | 709 | forward 2 | TM | N in |
| 198 | LG:162161.1:2000MAY19 | 372 | 458 | forward 3 | TM | N in |
| 199 | LG:407214.10:2000MAY19 | 34 | 120 | forward 1 | TM | N out |
| 199 | LG:407214.10:2000MAY19 | 44 | 124 | forward 2 | TM | N out |
| 199 | LG:407214.10:2000MAY19 | 203 | 289 | forward 2 | TM | N out |
| 200 | LG:204626.1:2000MAY19 | 19 | 99 | forward 1 | TM | N out |
| 202 | LI:476342.1:2000MAY01 | 39 | 122 | forward 3 | TM | N out |
| 203 | LI:1072759.1:2000MAY01 | 409 | 495 | forward 1 | TM | N in |
| 203 | LI:1072759.1:2000MAY01 | 889 | 951 | forward 1 | TM | N in |
| 203 | LI:1072759.1:2000MAY01 | 1387 | 1458 | forward 1 | TM | N in |
| 203 | LI:1072759.1:2000MAY01 | 1687 | 1770 | forward 1 | TM | N in |
| 203 | LI:1072759.1:2000MAY01 | 392 | 478 | forward 2 | TM | N out |
| 203 | LI:1072759.1:2000MAY01 | 1055 | 1132 | forward 2 | TM | N out |
| 203 | LI:1072759.1:2000MAY01 | 1424 | 1507 | forward 2 | TM | N out |
| 203 | LI:1072759.1:2000MAY01 | 1694 | 1768 | forward 2 | TM | N out |
| 203 | LI:1072759.1:2000MAY01 | 1191 | 1277 | forward 3 | TM | N out |
| 203 | LI:1072759.1:2000MAY01 | 1677 | 1760 | forward 3 | TM | N out |
| 204 | LG:998857.1:2000FEB18 | 1195 | 1281 | forward 1 | TM | N in |
| 204 | LG:998857.1:2000FEB18 | 164 | 226 | forward 2 | TM | N out |
| 204 | LG:998857.1:2000FEB18 | 344 | 400 | forward 2 | TM | N out |
| 204 | LG:998857.1:2000FEB18 | 398 | 460 | forward 2 | TM | N out |
| 204 | LG:998857.1:2000FEB18 | 1478 | 1561 | forward 2 | TM | N out |
| 205 | LG:482261.1:2000FEB18 | 19 | 93 | forward 1 | TM | N out |
| 205 | LG:482261.1:2000FEB18 | 890 | 961 | forward 2 | TM | N out |
| 205 | LG:482261.1:2000FEB18 | 1070 | 1123 | forward 2 | TM | N out |
| 205 | LG:482261.1:2000FEB18 | 21 | 89 | forward 3 | TM | N out |
| 205 | LG:482261.1:2000FEB18 | 1242 | 1292 | forward 3 | TM | N out |
| 206 | LG:480328.1:2000FEB18 | 436 | 522 | forward 1 | TM | N out |
| 206 | LG:480328.1:2000FEB18 | 568 | 642 | forward 1 | TM | N out |
| 206 | LG:480328.1:2000FEB18 | 769 | 849 | forward 1 | TM | N out |
| 206 | LG:480328.1:2000FEB18 | 967 | 1029 | forward 1 | TM | N out |
| 206 | LG:480328.1:2000FEB18 | 56 | 130 | forward 2 | TM | N in |
| 206 | LG:480328.1:2000FEB18 | 194 | 280 | forward 2 | TM | N in |
| 206 | LG:480328.1:2000FEB18 | 396 | 482 | forward 3 | TM | N out |
| 206 | LG:480328.1:2000FEB18 | 747 | 818 | forward 3 | TM | N out |
| 207 | LG:311197.1:2000MAY19 | 241 | 315 | forward 1 | TM | N in |
| 207 | LG:311197.1:2000MAY19 | 527 | 613 | forward 2 | TM | N out |
| 208 | LG:1054883.1:2000MAY19 | 76 | 129 | forward 1 | TM | N out |
| 208 | LG:1054883.1:2000MAY19 | 83 | 145 | forward 2 | TM | N out |
| 209 | LG:399395.1:2000MAY19 | 163 | 216 | forward 1 | TM | N out |
| 211 | LI:272913.22:2000MAY01 | 37 | 123 | forward 1 | TM | N in |

[0900] TABLE 4

| SEQ ID NO: | Component ID | Start | Stop |
|---|---|---|---|
| 1 | g1260446 | 2 | 316 |
| 1 | 6791379H1 | 1 | 397 |
| 1 | g1614819 | 215 | 655 |
| 1 | g1647514 | 244 | 543 |
| 2 | 5911492F8 | 1 | 467 |
| 2 | 5911492H1 | 1 | 271 |
| 2 | 5911492T8 | 303 | 633 |
| 3 | 5311056H1 | 591 | 753 |
| 3 | 6866213H1 | 784 | 1388 |
| 3 | 5659105H1 | 1261 | 1340 |
| 3 | 5498383R6 | 1291 | 1674 |
| 3 | g5553287 | 1 | 315 |
| 3 | 6989857H1 | 1 | 436 |
| 3 | 6955370H1 | 22 | 540 |
| 3 | g4534562 | 24 | 504 |
| 3 | g4390046 | 24 | 500 |
| 3 | g1192915 | 25 | 170 |
| 3 | g2003054 | 31 | 344 |
| 3 | 6818987J1 | 33 | 250 |
| 3 | 6818431J1 | 33 | 570 |
| 3 | g2003419 | 45 | 421 |
| 3 | g1551472 | 61 | 213 |
| 3 | 6147606H1 | 71 | 625 |
| 3 | 6990907H1 | 383 | 885 |
| 3 | 6866026H1 | 381 | 973 |
| 3 | 7067123H1 | 525 | 1069 |
| 3 | 5498383F6 | 573 | 1055 |
| 3 | 5498383H1 | 573 | 811 |
| 4 | 1709025H1 | 198 | 445 |
| 4 | 70319971D1 | 397 | 784 |
| 4 | 70320592D1 | 412 | 733 |
| 4 | 70320769D1 | 462 | 809 |
| 4 | 70317687D1 | 464 | 962 |
| 4 | 6483492H1 | 184 | 713 |
| 4 | 5006925H1 | 88 | 362 |
| 4 | 70513533D1 | 496 | 1069 |
| 4 | 70317606D1 | 522 | 961 |
| 4 | 1296898H1 | 262 | 495 |
| 4 | 6338333H1 | 640 | 1159 |
| 4 | g4332126 | 1 | 454 |
| 4 | 2659966F6 | 1 | 192 |
| 4 | 2659966T6 | 1 | 194 |
| 4 | 70513545V1 | 31 | 585 |
| 4 | 70514030D1 | 31 | 577 |
| 4 | 70514030V1 | 31 | 589 |
| 4 | 70513041V1 | 31 | 366 |
| 4 | 2659966H1 | 1 | 247 |
| 4 | 70512591V1 | 31 | 171 |
| 4 | 70512591D1 | 31 | 169 |
| 4 | 70318172D1 | 57 | 447 |
| 4 | 70513426V1 | 61 | 680 |
| 4 | 70320498D1 | 247 | 638 |
| 4 | 034207H1 | 1 | 290 |
| 4 | 70515532V1 | 24 | 612 |
| 4 | 70317785D1 | 295 | 738 |
| 4 | 70516168V1 | 24 | 391 |
| 4 | 70321122D1 | 370 | 783 |
| 4 | 70514482D1 | 24 | 278 |
| 4 | 70514482V1 | 24 | 278 |
| 4 | 70318245D1 | 25 | 395 |
| 4 | 70318040D1 | 29 | 409 |
| 4 | 70514959V1 | 1 | 300 |
| 5 | g2958900 | 175 | 294 |
| 5 | 167606H1 | 1 | 173 |
| 5 | 60123139D2 | 1 | 307 |
| 5 | 60123152D1 | 1 | 368 |
| 5 | 60123139D1 | 11 | 156 |
| 5 | 6127857H1 | 1 | 475 |
| 5 | g706800 | 1 | 340 |
| 5 | g690740 | 11 | 385 |
| 5 | 4454268H1 | 377 | 645 |
| 5 | 60123152B1 | 714 | 1379 |
| 5 | 1602161H1 | 603 | 798 |
| 5 | 6217784H1 | 857 | 1351 |
| 5 | 6217935H1 | 859 | 1356 |
| 5 | 1473544R6 | 214 | 653 |
| 5 | 1473544T1 | 249 | 653 |
| 5 | 1473544H1 | 408 | 653 |
| 5 | 60123139B1 | 948 | 1362 |
| 5 | 60124858B2 | 982 | 1362 |
| 5 | g4457589 | 222 | 601 |
| 5 | 1473544T6 | 247 | 569 |
| 5 | g715576 | 191 | 567 |
| 5 | g993694 | 255 | 560 |
| 5 | 2866203H1 | 459 | 557 |
| 5 | g682774 | 196 | 472 |
| 5 | g3213293 | 1 | 454 |
| 5 | g3148379 | 141 | 356 |
| 6 | 4835189H1 | 679 | 932 |
| 6 | g1920265 | 798 | 1061 |
| 6 | 4541025H1 | 804 | 1057 |
| 6 | 2330975H1 | 952 | 1172 |
| 6 | 2330975R6 | 952 | 1311 |
| 6 | 2430651T6 | 1141 | 1667 |
| 6 | 2571536T6 | 1144 | 1680 |
| 6 | 3878850T6 | 1244 | 1662 |
| 6 | g2930491 | 1302 | 1714 |
| 6 | g3844521 | 1455 | 1711 |
| 6 | 6623593H1 | 104 | 689 |
| 6 | 6623593J1 | 634 | 1236 |
| 6 | 4724029H1 | 1 | 133 |
| 6 | 5577111H1 | 14 | 200 |
| 6 | g2183982 | 84 | 445 |
| 6 | 3878850F6 | 119 | 524 |
| 6 | 3878850H1 | 120 | 399 |
| 6 | g2783388 | 239 | 721 |
| 6 | g2785249 | 239 | 710 |
| 6 | g1920471 | 284 | 439 |
| 6 | g1784782 | 388 | 828 |
| 6 | 6551102H1 | 429 | 951 |
| 6 | 6550902H1 | 429 | 1042 |
| 6 | 6551002H1 | 429 | 957 |
| 6 | g3645387 | 447 | 909 |
| 6 | 2430651H1 | 448 | 703 |
| 6 | 2430651R6 | 448 | 680 |
| 6 | 3712318H1 | 471 | 759 |
| 6 | g981405 | 485 | 787 |
| 6 | g1975879 | 1 | 219 |
| 6 | g1784993 | 585 | 909 |
| 6 | 1467511T7 | 1 | 438 |
| 6 | 6326238H1 | 8 | 306 |
| 6 | 526662H1 | 25 | 208 |
| 6 | 2856544H1 | 34 | 146 |
| 7 | 1980062R6 | 2 | 491 |
| 7 | 1980059H1 | 1 | 280 |
| 7 | 5573392H1 | 30 | 283 |
| 8 | 2642346H1 | 1 | 239 |
| 8 | 2662640H1 | 2 | 95 |
| 8 | 2523793H1 | 11 | 212 |
| 8 | 3155877H1 | 12 | 278 |
| 8 | 3539049H1 | 13 | 237 |
| 8 | 3179390H1 | 13 | 320 |
| 8 | 5543678H1 | 15 | 210 |
| 8 | 6834974H1 | 15 | 623 |
| 8 | 257055R6 | 16 | 423 |
| 8 | 133343H1 | 16 | 157 |
| 8 | 484198H1 | 16 | 163 |
| 8 | 257055H1 | 17 | 224 |
| 8 | 2346879H1 | 18 | 247 |
| 8 | 2346879F6 | 18 | 442 |
| 8 | g1985882 | 19 | 366 |
| 8 | 3156918H1 | 21 | 155 |
| 8 | 4934879H1 | 22 | 297 |
| 8 | g1751206 | 41 | 388 |
| 8 | 4024568H1 | 42 | 189 |
| 8 | 258140H1 | 58 | 433 |
| 8 | 2346879T6 | 167 | 442 |
| 8 | 2313878H1 | 229 | 495 |
| 8 | 6081177H1 | 264 | 720 |
| 8 | 3773491H1 | 306 | 476 |
| 8 | 6413047H1 | 401 | 935 |
| 8 | 4212712H1 | 407 | 675 |
| 8 | 6918705H1 | 413 | 837 |
| 8 | 3014942H1 | 416 | 684 |
| 8 | 1807684F6 | 483 | 905 |
| 8 | 1803962F6 | 483 | 841 |
| 8 | 1803962H1 | 483 | 760 |
| 8 | 1807684H1 | 483 | 746 |
| 8 | 3876768H1 | 529 | 819 |
| 8 | 6024789H1 | 553 | 695 |
| 8 | 4062033H1 | 555 | 779 |
| 8 | 4634711H1 | 615 | 877 |
| 8 | 3014303H1 | 667 | 964 |
| 8 | 3014303F6 | 667 | 1096 |
| 8 | 1633402H1 | 672 | 885 |
| 8 | 5865873H1 | 725 | 997 |
| 8 | 6552378H1 | 881 | 1430 |
| 8 | 2892794H1 | 907 | 1089 |
| 8 | 2892794F6 | 907 | 1389 |
| 8 | 6406936H1 | 935 | 1476 |
| 8 | 4902732H1 | 962 | 1225 |
| 8 | 1492959H1 | 970 | 1171 |
| 8 | g1686447 | 974 | 1299 |
| 8 | 5929258H1 | 974 | 1266 |
| 8 | 3509940H1 | 974 | 1230 |
| 8 | 4588644H1 | 983 | 1230 |
| 8 | 6979634H1 | 991 | 1412 |
| 8 | 946914H1 | 1010 | 1310 |
| 8 | g5854943 | 1083 | 1460 |
| 8 | 5544986H1 | 1095 | 1303 |
| 8 | 3860122H1 | 1133 | 1400 |
| 8 | g4260489 | 1228 | 1701 |
| 8 | 1724521H1 | 1385 | 1493 |
| 8 | 1724521F6 | 1385 | 1714 |
| 8 | 3026692H1 | 1429 | 1687 |
| 8 | 3881903H1 | 1460 | 1700 |
| 8 | 3014303T6 | 1504 | 1714 |
| 8 | 490059H1 | 1515 | 1763 |
| 8 | 1803962T6 | 1575 | 1714 |
| 8 | 692274H1 | 1583 | 1765 |
| 8 | 2313878T6 | 1587 | 1714 |
| 8 | g2436491 | 1623 | 1714 |
| 8 | g3277091 | 1654 | 1714 |
| 8 | 3319247H1 | 1718 | 1969 |
| 8 | 4917483H1 | 1916 | 2145 |
| 8 | 6826179J1 | 1971 | 2309 |
| 8 | 6826179H1 | 1971 | 2309 |
| 9 | 3088820H1 | 537 | 807 |
| 9 | 2012535H1 | 561 | 787 |
| 9 | 3232447H1 | 618 | 863 |
| 9 | 2536817H2 | 670 | 926 |
| 9 | g2209764 | 832 | 1178 |
| 9 | 7260050H1 | 1 | 537 |
| 9 | 2457623F6 | 101 | 601 |
| 9 | 6987326H1 | 110 | 654 |
| 9 | 7032756H1 | 151 | 720 |
| 9 | 6457158H1 | 350 | 878 |
| 9 | 2890632F6 | 351 | 531 |
| 9 | 2893095F6 | 351 | 909 |
| 9 | 2893095H1 | 351 | 614 |
| 9 | 7166124H1 | 401 | 930 |
| 9 | 4760777H1 | 427 | 714 |
| 9 | 3160745H1 | 437 | 710 |
| 9 | g2006716 | 479 | 776 |
| 9 | g2209659 | 481 | 940 |
| 9 | 3362481H1 | 514 | 763 |
| 9 | 1751755H1 | 520 | 735 |
| 9 | 6141843H1 | 536 | 793 |
| 10 | 6584158H1 | 14 | 592 |
| 10 | 3401851H1 | 4 | 241 |
| 10 | 3403550H1 | 1 | 259 |
| 10 | 3404251H1 | 3 | 258 |
| 10 | g1137215 | 2430 | 2639 |
| 10 | 3378612H1 | 2451 | 2638 |
| 10 | 6584049H1 | 6 | 562 |
| 10 | 3402034H1 | 10 | 229 |
| 10 | g307503 | 16 | 2638 |
| 10 | 70779637V1 | 2077 | 2632 |
| 10 | 7258175H1 | 2121 | 2603 |
| 10 | 3961980H1 | 2130 | 2252 |
| 10 | 6584189T1 | 2152 | 2553 |
| 10 | 6584158T1 | 2159 | 2659 |
| 10 | g3785069 | 2394 | 2641 |
| 10 | 981592T6 | 2170 | 2701 |
| 10 | 3385383T6 | 2171 | 2601 |
| 10 | 1221889T6 | 2202 | 2700 |
| 10 | 70779908V1 | 2348 | 2654 |
| 10 | 70776665V1 | 1884 | 2562 |
| 10 | 70775642V1 | 1981 | 2519 |
| 10 | 70776673V1 | 2022 | 2640 |
| 10 | 6584049T1 | 2035 | 2569 |
| 10 | 3401765H1 | 2050 | 2287 |
| 10 | 3401379H1 | 15 | 260 |
| 10 | 3404170H1 | 18 | 267 |
| 11 | 6905943H1 | 1 | 534 |
| 12 | 70562343V1 | 1 | 628 |
| 12 | 70560334V1 | 1 | 538 |
| 12 | 70559056V1 | 2 | 275 |
| 12 | 70560532V1 | 12 | 269 |
| 12 | 70559641V1 | 12 | 383 |
| 12 | 70559213V1 | 12 | 511 |
| 12 | 70561550V1 | 12 | 575 |
| 12 | 70561738V1 | 12 | 582 |
| 12 | 70559422V1 | 13 | 631 |
| 12 | 70559480V1 | 12 | 687 |
| 12 | 758040H1 | 12 | 272 |
| 12 | 70559415V1 | 13 | 605 |
| 12 | 758040R6 | 12 | 310 |
| 12 | 70561876V1 | 13 | 585 |
| 12 | 70559130V1 | 35 | 384 |
| 12 | g2576304 | 119 | 2175 |
| 12 | 70561182V1 | 150 | 812 |
| 12 | 70560479V1 | 217 | 834 |
| 12 | 70557043V1 | 221 | 595 |
| 12 | 70562198V1 | 227 | 819 |
| 12 | 70562312V1 | 245 | 894 |
| 12 | 70561005V1 | 249 | 895 |
| 12 | 70559925V1 | 254 | 840 |
| 12 | 70556220V1 | 274 | 841 |
| 12 | 70561793V1 | 282 | 939 |
| 12 | 70559002V1 | 293 | 888 |
| 12 | 6127888H1 | 351 | 824 |
| 12 | 70557039V1 | 359 | 611 |
| 12 | 70559636V1 | 391 | 1033 |
| 12 | 70561656V1 | 409 | 852 |
| 12 | 70560742V1 | 507 | 990 |
| 12 | 70561641V1 | 594 | 1066 |
| 12 | g873095 | 657 | 1032 |
| 12 | 70449484V1 | 674 | 894 |
| 12 | 6848717H1 | 732 | 1253 |
| 12 | 70558944V1 | 1495 | 2173 |
| 12 | 70450051V1 | 1550 | 1731 |
| 12 | 70561063V1 | 1607 | 2025 |
| 12 | g5361507 | 1719 | 2172 |
| 12 | g4735148 | 1778 | 2172 |
| 12 | g4875543 | 1779 | 2195 |
| 12 | 758040T6 | 1784 | 2147 |
| 12 | g872996 | 1824 | 2188 |
| 12 | g3840560 | 1830 | 2175 |
| 12 | g4333943 | 2114 | 2199 |
| 13 | 2734453F6 | 1 | 435 |
| 13 | 2734453H1 | 1 | 252 |
| 14 | 4860612T7 | 1184 | 1574 |
| 14 | g902319 | 1020 | 1492 |
| 14 | g778351 | 1137 | 1386 |
| 14 | g1638619 | 1140 | 1268 |
| 14 | 6929341H1 | 724 | 1222 |
| 14 | 1675892T6 | 754 | 1203 |
| 14 | 1720010F6 | 696 | 1079 |
| 14 | 1720010H1 | 696 | 922 |
| 14 | 4711951H1 | 675 | 833 |
| 14 | 5496406H1 | 546 | 795 |
| 14 | 6420632H1 | 79 | 637 |
| 14 | 2195346F6 | 1 | 450 |
| 14 | 2195346H1 | 344 | 450 |
| 14 | 3933140F6 | 11 | 351 |
| 14 | 3933140H1 | 96 | 351 |
| 14 | 6020638H1 | 1 | 263 |
| 14 | g5880310 | 52 | 255 |
| 14 | g2156573 | 11 | 254 |
| 14 | g2264198 | 30 | 253 |
| 14 | 6936789H1 | 11 | 173 |
| 14 | 5043956H1 | 11 | 159 |
| 15 | 1897573H1 | 1 | 259 |
| 15 | 4337619T6 | 137 | 645 |
| 15 | 5436383H1 | 598 | 849 |
| 16 | 1671029F6 | 1 | 443 |
| 16 | 1671029H1 | 72 | 144 |
| 16 | 1671029T6 | 388 | 443 |
| 16 | g2238932 | 388 | 443 |
| 16 | g2243675 | 388 | 443 |
| 17 | g2219785 | 236 | 531 |
| 17 | 5099781H1 | 378 | 604 |
| 17 | 3254347R6 | 527 | 1132 |
| 17 | 5668261H1 | 661 | 889 |
| 17 | 4289028H1 | 781 | 1061 |
| 17 | g3931955 | 822 | 1267 |
| 17 | g3401348 | 823 | 1271 |
| 17 | g2825326 | 825 | 1144 |
| 17 | 2750359R6 | 824 | 1242 |
| 17 | 2750359T6 | 847 | 1241 |
| 17 | 2351445H1 | 151 | 367 |
| 17 | 2750359H1 | 968 | 1241 |
| 17 | 2203345H1 | 1018 | 1169 |
| 17 | 3254347H1 | 979 | 1089 |
| 17 | 4822216H1 | 1202 | 1393 |
| 17 | 3184753F6 | 1 | 472 |
| 17 | 5108214T6 | 60 | 258 |
| 17 | 3184753T6 | 60 | 312 |
| 17 | g4287070 | 152 | 617 |
| 17 | g2524411 | 160 | 493 |
| 17 | 3184753H1 | 228 | 472 |
| 17 | g2788109 | 236 | 513 |
| 18 | 6829315H1 | 314 | 884 |
| 18 | g3109791 | 492 | 811 |
| 18 | g5452473 | 492 | 650 |
| 18 | g4564783 | 26 | 423 |
| 18 | g5438746 | 1 | 423 |
| 18 | g3805312 | 34 | 423 |
| 18 | g4372490 | 78 | 423 |
| 18 | g2954208 | 76 | 423 |
| 18 | g2954218 | 142 | 422 |
| 18 | g3307490 | 142 | 344 |
| 18 | 2011384H1 | 190 | 263 |
| 19 | 3106785H1 | 747 | 1023 |
| 19 | g565430 | 783 | 1150 |
| 19 | g1505888 | 812 | 1132 |
| 19 | g892901 | 859 | 1159 |
| 19 | g892900 | 1 | 179 |
| 19 | 3436153H1 | 1 | 269 |
| 19 | g4737696 | 1 | 452 |
| 19 | 839090H1 | 73 | 301 |
| 19 | 6938671H1 | 206 | 685 |
| 19 | 6939071H1 | 207 | 731 |
| 19 | g646973 | 427 | 675 |
| 19 | g1277657 | 484 | 934 |
| 19 | 2755039H1 | 596 | 767 |
| 19 | 838332T6 | 615 | 1116 |
| 19 | 4800144H1 | 651 | 916 |
| 19 | 2084151H1 | 664 | 945 |
| 20 | 6199407H1 | 1 | 558 |
| 20 | 2519336F6 | 37 | 448 |
| 20 | 2519336H1 | 37 | 198 |
| 20 | 6793417H1 | 61 | 331 |
| 20 | 1639314H1 | 71 | 248 |
| 20 | 6818283H1 | 75 | 652 |
| 20 | 1984661R6 | 94 | 490 |
| 20 | 1984662H1 | 94 | 368 |
| 20 | 1984661T6 | 127 | 543 |
| 20 | 4021069H1 | 177 | 388 |
| 20 | 3456613H1 | 177 | 427 |
| 20 | 4923878H1 | 211 | 494 |
| 20 | 6847871H1 | 274 | 451 |
| 20 | g5151844 | 373 | 585 |
| 21 | g4281322 | 2017 | 2463 |
| 21 | 3934096H1 | 2040 | 2211 |
| 21 | 3934274H1 | 2042 | 2187 |
| 21 | 1648485T6 | 2045 | 2159 |
| 21 | 1648242H1 | 2052 | 2198 |
| 21 | 1648485H1 | 2052 | 2198 |
| 21 | 1648485F6 | 2052 | 2198 |
| 21 | 4676772H1 | 2056 | 2317 |
| 21 | 1004843T6 | 2092 | 2693 |
| 21 | g4533314 | 2101 | 2207 |
| 21 | 3416826H1 | 2134 | 2365 |
| 21 | 5304471H1 | 2184 | 2431 |
| 21 | 1310089F6 | 2250 | 2718 |
| 21 | 1310089H1 | 2250 | 2448 |
| 21 | 2461918H1 | 2266 | 2461 |
| 21 | g4330296 | 2658 | 2953 |
| 21 | g3178479 | 2713 | 2950 |
| 21 | g856243 | 2748 | 3020 |
| 21 | 3951063F6 | 1 | 417 |
| 21 | 3951063H1 | 1 | 285 |
| 21 | g2114724 | 215 | 609 |
| 21 | 1804812F6 | 311 | 871 |
| 21 | 1804812H1 | 311 | 582 |
| 21 | 1804772H1 | 311 | 530 |
| 21 | 2662164H1 | 346 | 588 |
| 21 | 2011927H1 | 365 | 608 |
| 21 | 4863613H1 | 380 | 645 |
| 21 | 3934325H1 | 386 | 672 |
| 21 | 3763239H1 | 402 | 671 |
| 21 | 1004843R6 | 502 | 864 |
| 21 | 1004843H1 | 502 | 706 |
| 21 | g846375 | 547 | 889 |
| 21 | 5810205H1 | 585 | 885 |
| 21 | 384851H1 | 652 | 926 |
| 21 | g1861137 | 688 | 1180 |
| 21 | 2670050H1 | 722 | 974 |
| 21 | 4118973H1 | 762 | 1013 |
| 21 | 2744119H1 | 784 | 968 |
| 21 | g1081212 | 787 | 1107 |
| 21 | 5576610H1 | 879 | 1134 |
| 21 | 6418368H1 | 926 | 1226 |
| 21 | 5864111H1 | 950 | 1233 |
| 21 | 5033538H1 | 997 | 1264 |
| 21 | 3511167H1 | 1010 | 1288 |
| 21 | 5805062H1 | 1021 | 1225 |
| 21 | 4873652H1 | 1038 | 1293 |
| 21 | 6614566H1 | 1064 | 1565 |
| 21 | 2645969F6 | 1085 | 1588 |
| 21 | 2645969H1 | 1085 | 1330 |
| 21 | g2112831 | 1112 | 1336 |
| 21 | 3742279H1 | 1144 | 1422 |
| 21 | 6334985H1 | 1249 | 1754 |
| 21 | 5292787H2 | 1287 | 1357 |
| 21 | g853299 | 1363 | 1679 |
| 21 | 5742830H1 | 1399 | 1713 |
| 21 | 777713H1 | 1400 | 1625 |
| 21 | 777713R6 | 1401 | 1702 |
| 21 | 2291319H1 | 1424 | 1651 |
| 21 | 3241291H1 | 1436 | 1673 |
| 21 | 1832630H1 | 1481 | 1750 |
| 21 | 1804812T6 | 1571 | 2172 |
| 21 | 1481768H1 | 1572 | 1793 |
| 21 | 3730896H1 | 1583 | 1874 |
| 21 | 4442950H1 | 1631 | 1773 |
| 21 | 2794894H1 | 1648 | 1896 |
| 21 | 4161422H1 | 1664 | 1913 |
| 21 | 4163675H1 | 1665 | 1779 |
| 21 | g2787436 | 1672 | 1875 |
| 21 | 1898917T6 | 1693 | 2159 |
| 21 | 5026603H1 | 1695 | 1945 |
| 21 | 3726809H1 | 1753 | 2047 |
| 21 | 1891483T6 | 1803 | 2160 |
| 21 | 2293309H1 | 1836 | 2077 |
| 21 | 1214225H1 | 1850 | 2020 |
| 21 | g856337 | 1855 | 2128 |
| 21 | g3733909 | 1913 | 2198 |
| 21 | g3890798 | 1917 | 2386 |
| 21 | 5696574H1 | 1925 | 2048 |
| 21 | g1081162 | 1942 | 2201 |
| 21 | 2645969T6 | 1964 | 2222 |
| 21 | g1860963 | 1970 | 2387 |
| 21 | 777713T6 | 1983 | 2420 |
| 21 | g4149122 | 1984 | 2203 |
| 21 | 4875545H1 | 1994 | 2292 |
| 22 | 487652H1 | 1 | 242 |
| 22 | 487652R6 | 1 | 232 |
| 22 | g2003010 | 47 | 328 |
| 22 | 6442754H1 | 49 | 581 |
| 22 | 6152037H1 | 50 | 234 |
| 22 | 7072795H1 | 75 | 624 |
| 22 | 3126080H1 | 75 | 234 |
| 22 | 491193H1 | 83 | 234 |
| 22 | 4751976H1 | 90 | 232 |
| 22 | 7100707H1 | 100 | 609 |
| 22 | 2292643H1 | 102 | 232 |
| 22 | 6140970H1 | 105 | 232 |
| 22 | 4066069H1 | 110 | 234 |
| 22 | 5007390H1 | 113 | 231 |
| 22 | 4773161H1 | 130 | 415 |
| 22 | 6993149H1 | 145 | 680 |
| 22 | 572575H1 | 150 | 232 |
| 22 | 5756677H1 | 180 | 483 |
| 22 | 6064882H1 | 346 | 644 |
| 22 | 5372689H1 | 367 | 514 |
| 22 | 3123257H1 | 367 | 493 |
| 22 | g2022792 | 381 | 648 |
| 22 | 5068149H1 | 503 | 782 |
| 22 | 5894157H1 | 560 | 759 |
| 22 | 5898812H1 | 560 | 853 |
| 22 | 2621801H1 | 561 | 824 |
| 22 | 6401738H1 | 574 | 844 |
| 22 | 2122453H1 | 622 | 902 |
| 22 | 2122453F6 | 622 | 764 |
| 22 | 5681165H1 | 629 | 889 |
| 22 | 5277977H1 | 637 | 892 |
| 22 | 4645753H1 | 659 | 921 |
| 22 | 6193452H1 | 705 | 1000 |
| 22 | 6193441H1 | 705 | 963 |
| 22 | 746066H1 | 713 | 961 |
| 22 | 4771093H1 | 754 | 1022 |
| 22 | g2054100 | 771 | 1123 |
| 22 | g4762720 | 796 | 1252 |
| 22 | g2321843 | 801 | 1217 |
| 22 | g3017276 | 804 | 1256 |
| 22 | g483457 | 850 | 1222 |
| 22 | g4762705 | 865 | 1252 |
| 22 | 4338534H1 | 870 | 1155 |
| 22 | 628211H1 | 887 | 1051 |
| 22 | 5563275H1 | 922 | 1144 |
| 22 | 5286207H1 | 952 | 1210 |
| 22 | 6160626H1 | 953 | 1244 |
| 22 | 6838871H1 | 1013 | 1491 |
| 22 | 2400686H1 | 1068 | 1153 |
| 22 | g866503 | 1107 | 1440 |
| 22 | 6747627H1 | 1122 | 1593 |
| 22 | g920433 | 1143 | 1481 |
| 22 | 2294209R6 | 1179 | 1688 |
| 22 | 2294209H1 | 1179 | 1444 |
| 22 | g1471741 | 1213 | 1600 |
| 22 | g1332314 | 1213 | 1712 |
| 22 | 6021757H1 | 1214 | 1822 |
| 22 | 2189963H1 | 1229 | 1505 |
| 22 | g5766946 | 1310 | 1760 |
| 22 | g2524669 | 1309 | 1776 |
| 22 | g2178309 | 1317 | 1448 |
| 22 | g4762067 | 1326 | 1779 |
| 22 | g5361693 | 1328 | 1778 |
| 22 | g4074013 | 1332 | 1773 |
| 22 | g5849550 | 1331 | 1762 |
| 22 | 6736883H1 | 1355 | 1730 |
| 22 | g2183535 | 1356 | 1766 |
| 22 | g4332913 | 1357 | 1772 |
| 22 | g3147585 | 1357 | 1758 |
| 22 | g2053942 | 1361 | 1759 |
| 22 | g1332315 | 1371 | 1839 |
| 22 | 3918780H1 | 1373 | 1665 |
| 22 | g3884754 | 1379 | 1765 |
| 22 | 5207656H1 | 1382 | 1616 |
| 22 | 2292948H1 | 1388 | 1552 |
| 22 | 1373715H1 | 1388 | 1603 |
| 22 | 4742391H1 | 1388 | 1647 |
| 22 | 2749392H1 | 1400 | 1627 |
| 22 | g1241849 | 1408 | 1559 |
| 22 | g6046888 | 1408 | 1785 |
| 22 | 2294209T6 | 1428 | 1945 |
| 22 | g1471742 | 1441 | 1766 |
| 22 | g4332659 | 1471 | 1772 |
| 22 | g3842415 | 1473 | 1785 |
| 22 | g2841585 | 1474 | 1756 |
| 22 | g2003011 | 1479 | 1772 |
| 22 | 2501320H1 | 1513 | 1738 |
| 22 | g3961438 | 1525 | 1988 |
| 22 | g2022791 | 1559 | 1757 |
| 22 | g6132921 | 1559 | 1977 |
| 22 | 5690247H1 | 1568 | 1843 |
| 22 | g1496515 | 1580 | 1977 |
| 22 | g2252260 | 1620 | 1984 |
| 22 | g3739177 | 1650 | 1831 |
| 22 | 5338636H1 | 1671 | 1915 |
| 22 | 5710854H2 | 1686 | 2004 |
| 22 | 3223930H1 | 1686 | 1772 |
| 22 | 4255692H1 | 1701 | 1756 |
| 22 | g1210253 | 1725 | 1980 |
| 22 | g920434 | 1730 | 1946 |
| 22 | g1210208 | 1763 | 1980 |
| 22 | 4320678H1 | 1841 | 1973 |
| 22 | g884068 | 1924 | 2233 |
| 23 | 6991066H1 | 1 | 190 |
| 23 | 4753733H1 | 121 | 279 |
| 23 | 4753733F8 | 122 | 613 |
| 23 | 7065882H1 | 183 | 679 |
| 23 | g5676063 | 251 | 722 |
| 23 | 1576986F6 | 270 | 661 |
| 23 | 1576986H1 | 270 | 349 |
| 23 | 1576986T6 | 275 | 683 |
| 23 | g3843718 | 364 | 724 |
| 23 | g3750491 | 408 | 722 |
| 23 | 3604635H1 | 409 | 584 |
| 23 | g793096 | 600 | 881 |
| 24 | 6756043H1 | 101 | 504 |
| 24 | 3845553H1 | 368 | 574 |
| 24 | 5057288F9 | 382 | 1021 |
| 24 | 5057288H1 | 382 | 660 |
| 24 | 5065461F8 | 404 | 839 |
| 24 | 2359950H1 | 625 | 748 |
| 24 | 6112349H1 | 792 | 1081 |
| 24 | 5444375H1 | 912 | 1131 |
| 24 | g4264503 | 989 | 1390 |
| 24 | 3385663T6 | 1011 | 1248 |
| 24 | 3845553T6 | 1009 | 1248 |
| 24 | 3385663F6 | 1 | 315 |
| 24 | 3385663H1 | 1 | 257 |
| 24 | 5468404H1 | 3 | 271 |
| 24 | 5468404F8 | 3 | 587 |
| 24 | 5072501H1 | 11 | 292 |
| 24 | 6917202H1 | 10 | 259 |
| 24 | 4148204T6 | 1176 | 1391 |
| 24 | 4148204H1 | 1183 | 1435 |
| 24 | 4148204F6 | 1183 | 1390 |
| 24 | g4532148 | 1256 | 1361 |
| 24 | 213841R6 | 1325 | 1390 |
| 24 | 213841T6 | 1325 | 1393 |
| 24 | 213841H1 | 1325 | 1390 |
| 24 | 213833H1 | 1325 | 1390 |
| 25 | 7204172H1 | 1 | 536 |
| 25 | 6819816H1 | 368 | 566 |
| 25 | 6836688H1 | 383 | 960 |
| 25 | 6349781H2 | 434 | 616 |
| 25 | 7280863H1 | 477 | 880 |
| 25 | g4081510 | 513 | 860 |
| 25 | 6862186H1 | 519 | 806 |
| 25 | g5543132 | 541 | 939 |
| 25 | g4196555 | 541 | 821 |
| 25 | g5636120 | 541 | 982 |
| 25 | g3246528 | 541 | 923 |
| 25 | g5636142 | 541 | 1018 |
| 25 | g2568732 | 577 | 1024 |
| 25 | 3747228H1 | 589 | 887 |
| 25 | 6600395H1 | 587 | 999 |
| 25 | 6978931H1 | 605 | 954 |
| 25 | 2240520H1 | 629 | 730 |
| 25 | 2240520F6 | 641 | 967 |
| 25 | 5626829H1 | 663 | 931 |
| 25 | g2162199 | 663 | 863 |
| 25 | 6862047H1 | 699 | 978 |
| 25 | 7281807H1 | 809 | 1041 |
| 25 | g2209650 | 815 | 1308 |
| 25 | 6216076H1 | 841 | 1322 |
| 25 | 7238641H1 | 862 | 978 |
| 25 | 6210267H1 | 868 | 970 |
| 25 | 7039186H1 | 940 | 1508 |
| 25 | g2209760 | 1092 | 1569 |
| 26 | 7281748H1 | 1 | 439 |
| 26 | 7281705H1 | 1 | 574 |
| 27 | 925628R6 | 1574 | 1961 |
| 27 | 6466550H1 | 228 | 746 |
| 27 | 035057H1 | 483 | 638 |
| 27 | 2173285F6 | 571 | 968 |
| 27 | 2173285H1 | 571 | 762 |
| 27 | 1743077R6 | 577 | 1069 |
| 27 | 1743077H1 | 577 | 892 |
| 27 | 3344276H1 | 598 | 856 |
| 27 | 6579246H1 | 697 | 1025 |
| 27 | 5637939F8 | 825 | 1101 |
| 27 | 5637939H1 | 825 | 1082 |
| 27 | 5624530R8 | 836 | 1190 |
| 27 | 5637939R8 | 1016 | 1380 |
| 27 | 3483518H1 | 1163 | 1470 |
| 27 | 6817649J1 | 1402 | 1969 |
| 27 | 2966432H1 | 1421 | 1627 |
| 27 | g3419012 | 1500 | 1961 |
| 27 | g2178116 | 1505 | 1630 |
| 27 | g2715860 | 1512 | 1962 |
| 27 | 3891858T6 | 1559 | 1901 |
| 27 | 3891858F6 | 1566 | 1961 |
| 27 | 3891858H1 | 1566 | 1796 |
| 27 | 925628T6 | 1574 | 1943 |
| 27 | 925628H1 | 1574 | 1797 |
| 27 | g5113339 | 1766 | 2184 |
| 27 | 7286802H1 | 1 | 500 |
| 27 | 3490274H1 | 26 | 319 |
| 27 | 6817649H1 | 55 | 308 |
| 27 | 6779822H1 | 68 | 617 |
| 27 | 1343838H1 | 166 | 433 |
| 28 | 6827746J1 | 1 | 328 |
| 28 | g4372436 | 2 | 487 |
| 28 | 7277307H1 | 1 | 320 |
| 28 | g1109781 | 68 | 2457 |
| 28 | g2987914 | 238 | 414 |
| 28 | 3242379H1 | 460 | 594 |
| 28 | 5843682H1 | 675 | 814 |
| 28 | 6244385H1 | 750 | 960 |
| 28 | 3560794H1 | 878 | 978 |
| 28 | 6146228H1 | 1389 | 1559 |
| 28 | g5454470 | 1759 | 2219 |
| 28 | g5634013 | 1818 | 2245 |
| 28 | g3933775 | 1835 | 2188 |
| 28 | 6824121H1 | 1864 | 2239 |
| 28 | 6824121J1 | 1864 | 2239 |
| 28 | 6789580H1 | 1898 | 2361 |
| 28 | g5596185 | 1915 | 2221 |
| 28 | g1137662 | 1994 | 2365 |
| 28 | g3917233 | 2020 | 2409 |
| 28 | 3222719H1 | 2019 | 2299 |
| 28 | g4487317 | 2029 | 2459 |
| 28 | g2878126 | 2045 | 2386 |
| 28 | 925319R6 | 2061 | 2458 |
| 28 | 925319T6 | 2061 | 2419 |
| 28 | 925319H1 | 2061 | 2370 |
| 28 | g6463796 | 2103 | 2467 |
| 28 | 2175458H1 | 2139 | 2397 |
| 28 | g1153903 | 2165 | 2458 |
| 28 | g1114183 | 2165 | 2444 |
| 28 | g3844190 | 2203 | 2458 |
| 28 | 6193937H1 | 2265 | 2534 |
| 28 | g5364673 | 2276 | 2476 |
| 29 | 6450124H1 | 992 | 1374 |
| 29 | 70254601V1 | 1036 | 1539 |
| 29 | 70250522V1 | 1050 | 1299 |
| 29 | 70255407V1 | 1073 | 1570 |
| 29 | g2004277 | 1088 | 1409 |
| 29 | 70247748V1 | 1116 | 1378 |
| 29 | 70249044V1 | 1117 | 1269 |
| 29 | 70256246V1 | 1130 | 1541 |
| 29 | 70248757V1 | 1132 | 1311 |
| 29 | 7331424H1 | 1149 | 1638 |
| 29 | 70248822V1 | 1157 | 1333 |
| 29 | 70656623V1 | 1723 | 2219 |
| 29 | 661089H1 | 1723 | 1986 |
| 29 | 661089R6 | 1723 | 2224 |
| 29 | 6444789H1 | 1742 | 2329 |
| 29 | 70248827V1 | 1769 | 2103 |
| 29 | 6551207H1 | 1771 | 2379 |
| 29 | 6745795H1 | 1775 | 1933 |
| 29 | 6977014H1 | 1787 | 2347 |
| 29 | 70258294V1 | 1791 | 2007 |
| 29 | 70254633V1 | 1805 | 2279 |
| 29 | 70255157V1 | 1838 | 2268 |
| 29 | 6746363H1 | 1854 | 2506 |
| 29 | 70655542V1 | 1865 | 1948 |
| 29 | 6561163H1 | 1872 | 2335 |
| 29 | 7239061H1 | 1879 | 2417 |
| 29 | 70247905V1 | 1879 | 2117 |
| 29 | 70255827V1 | 764 | 1239 |
| 29 | 70255250V1 | 842 | 1401 |
| 29 | 70248754V1 | 866 | 1233 |
| 29 | 70256314V1 | 917 | 1512 |
| 29 | 70254664V1 | 444 | 930 |
| 29 | 70254648V1 | 463 | 958 |
| 29 | 70257273V1 | 531 | 636 |
| 29 | g3778732 | 559 | 1002 |
| 29 | 4023624H1 | 1 | 286 |
| 29 | 70249613V1 | 1 | 198 |
| 29 | 3269702H1 | 8 | 254 |
| 29 | 70249634V1 | 142 | 374 |
| 29 | 1286494H1 | 165 | 402 |
| 29 | 7191139H2 | 175 | 755 |
| 29 | 5841654H1 | 175 | 446 |
| 29 | 7120789H1 | 398 | 702 |
| 29 | 70255670V1 | 413 | 949 |
| 29 | 70255767V1 | 1672 | 2119 |
| 29 | 3272240F6 | 1165 | 1617 |
| 29 | 3272240H1 | 1166 | 1413 |
| 29 | 70257558V1 | 1171 | 1601 |
| 29 | 70248599V1 | 1202 | 1420 |
| 29 | 70250795V1 | 1247 | 1524 |
| 29 | 70249059V1 | 1304 | 1679 |
| 29 | 70250085V1 | 1310 | 1485 |
| 29 | 70251290V1 | 1314 | 1573 |
| 29 | 70255060V1 | 1326 | 1720 |
| 29 | 70254762V1 | 1330 | 1860 |
| 29 | 70257824V1 | 1339 | 1525 |
| 29 | 70255199V1 | 1341 | 1753 |
| 29 | 70250692V1 | 1345 | 1576 |
| 29 | 70257468V1 | 1347 | 1462 |
| 29 | 70251556V1 | 1351 | 1435 |
| 29 | 70255729V1 | 1361 | 1869 |
| 29 | 70255867V1 | 1392 | 1903 |
| 29 | 70255422V1 | 1366 | 1870 |
| 29 | 70254725V1 | 1690 | 2218 |
| 29 | 70254417V1 | 1671 | 1916 |
| 29 | 7033280H1 | 1691 | 2365 |
| 29 | 1741694R6 | 1410 | 1866 |
| 29 | 1741694H1 | 1410 | 1587 |
| 29 | 70256209V1 | 1414 | 1915 |
| 29 | 7079231H1 | 1418 | 1892 |
| 29 | 70248162V1 | 1486 | 1604 |
| 29 | 70254647V1 | 612 | 1111 |
| 29 | 7077379H1 | 627 | 1163 |
| 29 | 7237267H1 | 1907 | 2197 |
| 29 | 70660270V1 | 1926 | 2390 |
| 29 | 70255193V1 | 1976 | 2586 |
| 29 | 70656301V1 | 1979 | 2231 |
| 29 | 71273576V1 | 1979 | 2197 |
| 29 | 6620779H1 | 2006 | 2603 |
| 29 | 70655675V1 | 2023 | 2430 |
| 29 | 70255204V1 | 2038 | 2632 |
| 29 | 1741694T6 | 2052 | 2625 |
| 29 | 6121206F8 | 2130 | 2669 |
| 29 | 5267406H1 | 2070 | 2344 |
| 29 | 6120592H1 | 2110 | 2682 |
| 29 | 6128080H1 | 2110 | 2689 |
| 29 | 6120292H1 | 2110 | 2671 |
| 29 | 6127177H1 | 2110 | 2671 |
| 29 | 3269702T6 | 2111 | 2623 |
| 29 | 70254909V1 | 2152 | 2688 |
| 29 | 4001246R6 | 2158 | 2517 |
| 29 | 4001246H1 | 2158 | 2458 |
| 29 | 70659041V1 | 2163 | 2394 |
| 29 | g5864796 | 2171 | 2685 |
| 29 | g2913171 | 2184 | 2622 |
| 29 | 6752303H1 | 2193 | 2671 |
| 29 | 70658326V1 | 2194 | 2559 |
| 29 | 70256172V1 | 2209 | 2671 |
| 29 | 2287809R6 | 2232 | 2681 |
| 29 | 2287809T6 | 2232 | 2629 |
| 29 | 2287809H1 | 2232 | 2458 |
| 29 | 6834934H1 | 2233 | 2671 |
| 29 | 2255790H1 | 2260 | 2543 |
| 29 | 70657495V1 | 2264 | 2391 |
| 29 | 6835034H1 | 2288 | 2570 |
| 29 | 70254456V1 | 2316 | 2671 |
| 29 | 661089T6 | 2355 | 2639 |
| 29 | 70249168V1 | 2452 | 2682 |
| 29 | 6059187H1 | 2608 | 2671 |
| 29 | 6059196H1 | 2606 | 2682 |
| 29 | 70255727V1 | 977 | 1493 |
| 29 | 70257455V1 | 1692 | 1951 |
| 29 | 70257816V1 | 1397 | 1604 |
| 29 | 70257088V2 | 1659 | 1980 |
| 29 | 70255058V1 | 1663 | 2172 |
| 29 | 5779331H1 | 1663 | 1928 |
| 29 | 70248161V1 | 1487 | 1604 |
| 29 | 6536779H1 | 1490 | 2108 |
| 29 | 70254435V1 | 1509 | 2113 |
| 29 | 70254449V1 | 1538 | 1906 |
| 29 | 70257853V1 | 1570 | 1900 |
| 29 | 70254760V1 | 1571 | 1970 |
| 29 | 70255434V1 | 1577 | 2080 |
| 29 | 5191169H1 | 1609 | 1875 |
| 29 | 70257088V1 | 1659 | 1980 |
| 29 | 70255260V1 | 1694 | 2245 |
| 29 | 70255174V1 | 1695 | 2113 |
| 29 | g756281 | 1698 | 2066 |
| 29 | 70247381V1 | 1704 | 2145 |
| 29 | 70659718V1 | 1723 | 2028 |
| 29 | 70254418V1 | 675 | 1188 |
| 29 | 70258031V1 | 699 | 905 |
| 29 | 7178470H1 | 651 | 1108 |
| 29 | 70256308V1 | 672 | 1122 |
| 30 | 70780965V1 | 4 | 464 |
| 30 | 2359950H1 | 634 | 758 |
| 30 | 70777278V1 | 648 | 1196 |
| 30 | 70780989V1 | 653 | 1111 |
| 30 | 70779952V1 | 697 | 1217 |
| 30 | 70777355V1 | 715 | 1195 |
| 30 | 70771142V1 | 716 | 1207 |
| 30 | 70775784V1 | 751 | 1132 |
| 30 | 70769785V1 | 764 | 1127 |
| 30 | 6112349H1 | 809 | 1108 |
| 30 | 70776223V1 | 839 | 1239 |
| 30 | 5444375H1 | 933 | 1164 |
| 30 | 5057288T8 | 997 | 1251 |
| 30 | g4264503 | 1011 | 1388 |
| 30 | 3385663T6 | 1033 | 1284 |
| 30 | 3845553T6 | 1031 | 1284 |
| 30 | 70776533V1 | 1086 | 1284 |
| 30 | 70776877V1 | 1087 | 1284 |
| 30 | 4148204T6 | 1174 | 1389 |
| 30 | 4148204F6 | 1181 | 1388 |
| 30 | 4148204H1 | 1181 | 1433 |
| 30 | g4532148 | 1254 | 1359 |
| 30 | 5072501H1 | 11 | 296 |
| 30 | 70770035V1 | 207 | 641 |
| 30 | 70769523V1 | 245 | 581 |
| 30 | 70779544V1 | 337 | 548 |
| 30 | 70776851V1 | 339 | 867 |
| 30 | 70779695V1 | 4 | 418 |
| 30 | 5468404H1 | 3 | 275 |
| 30 | 6756043H1 | 102 | 509 |
| 30 | 7190732H1 | 163 | 722 |
| 30 | 71087882V1 | 4 | 560 |
| 30 | 70777729V1 | 4 | 492 |
| 30 | 70781241V1 | 4 | 467 |
| 30 | 70780840V1 | 4 | 442 |
| 30 | 70779497V1 | 342 | 547 |
| 30 | 3845553H1 | 372 | 583 |
| 30 | 5057288F9 | 386 | 1043 |
| 30 | 5057288H1 | 386 | 669 |
| 30 | 70776801V1 | 399 | 933 |
| 30 | 5065461F8 | 408 | 858 |
| 30 | 70778496V1 | 429 | 737 |
| 30 | 70777098V1 | 456 | 752 |
| 30 | 70780976V1 | 476 | 1081 |
| 30 | 70777266V1 | 503 | 1128 |
| 30 | 70776726V1 | 513 | 1093 |
| 30 | 70772943V1 | 541 | 740 |
| 30 | 70777725V1 | 576 | 1166 |
| 30 | 70779028V1 | 613 | 766 |
| 30 | 213833H1 | 1323 | 1388 |
| 30 | 213841T6 | 1323 | 1391 |
| 30 | 213841R6 | 1323 | 1388 |
| 30 | 213841H1 | 1323 | 1388 |
| 30 | 6917202H1 | 10 | 263 |
| 30 | 3385663H1 | 1 | 261 |
| 30 | 5468404F8 | 3 | 596 |
| 30 | 3385663F6 | 1 | 319 |
| 30 | 70775648V1 | 4 | 416 |
| 30 | 70778292V1 | 4 | 577 |
| 30 | 70779496V1 | 4 | 568 |
| 30 | 70775549V1 | 4 | 538 |
| 30 | 70776773V1 | 4 | 576 |
| 31 | g3254719 | 1 | 445 |
| 31 | g5745388 | 1 | 462 |
| 31 | g3959110 | 1 | 353 |
| 31 | g897505 | 1 | 215 |
| 31 | g5233046 | 1 | 295 |
| 31 | g2929868 | 1 | 406 |
| 31 | g3016800 | 1 | 358 |
| 31 | 6202689H1 | 1 | 548 |
| 31 | g2435161 | 9 | 456 |
| 31 | 4707801H1 | 1197 | 1296 |
| 31 | 806768H1 | 1211 | 1421 |
| 31 | 6915008H1 | 1320 | 1761 |
| 31 | 3036834H1 | 1578 | 1846 |
| 31 | 3036834F6 | 1578 | 2016 |
| 31 | 5387714H1 | 1632 | 1886 |
| 31 | 7122625H1 | 443 | 835 |
| 31 | 6915116J1 | 622 | 1129 |
| 31 | 5092947H1 | 899 | 1177 |
| 31 | 5370334H1 | 939 | 1050 |
| 31 | 5092947F6 | 899 | 1330 |
| 31 | 5017752H1 | 959 | 1229 |
| 31 | 4707801F6 | 1197 | 1714 |
| 31 | 5505129H1 | 17 | 282 |
| 31 | 5514010H1 | 17 | 254 |
| 31 | 5505122H1 | 17 | 228 |
| 31 | 1225071H1 | 52 | 262 |
| 31 | g2929769 | 56 | 178 |
| 31 | 6314660H1 | 60 | 613 |
| 31 | 2682720F6 | 173 | 606 |
| 31 | 6516656H1 | 275 | 736 |
| 31 | 6201718H1 | 312 | 599 |
| 31 | 2682720H1 | 324 | 606 |
| 32 | 3665294H1 | 706 | 823 |
| 32 | g1139437 | 903 | 977 |
| 32 | 3663680H1 | 706 | 950 |
| 32 | 5040414H1 | 731 | 947 |
| 32 | g1139431 | 904 | 977 |
| 32 | 1772915R6 | 911 | 1308 |
| 32 | 1772915H1 | 911 | 966 |
| 32 | 4849209H1 | 1000 | 1259 |
| 32 | 1772915T6 | 1024 | 1540 |
| 32 | g4691031 | 1318 | 1588 |
| 32 | 6298418H1 | 1 | 314 |
| 32 | 3403590H1 | 1 | 232 |
| 32 | 6327716H1 | 98 | 415 |
| 32 | g1068995 | 238 | 588 |
| 32 | 6921019H1 | 255 | 457 |
| 32 | 4307678H1 | 254 | 563 |
| 32 | g1858272 | 267 | 664 |
| 32 | 2812311H1 | 503 | 816 |
| 32 | 2812294H1 | 505 | 826 |
| 32 | 4976432H1 | 536 | 792 |
| 32 | g5037963 | 518 | 976 |
| 32 | 4976496H1 | 536 | 801 |
| 32 | g3736768 | 525 | 978 |
| 32 | g4986041 | 540 | 979 |
| 32 | 4124067H1 | 552 | 792 |
| 32 | g4073888 | 527 | 978 |
| 32 | g5526438 | 564 | 978 |
| 32 | 5209523H1 | 413 | 705 |
| 32 | 4109819H1 | 416 | 696 |
| 32 | 3726063H1 | 426 | 688 |
| 32 | 4671035H1 | 421 | 693 |
| 32 | 2311003H1 | 454 | 685 |
| 32 | 5206768H1 | 478 | 723 |
| 32 | 679406H1 | 480 | 737 |
| 32 | 829499H1 | 273 | 519 |
| 32 | 2655709T6 | 279 | 932 |
| 32 | 1494347H1 | 285 | 504 |
| 32 | 042027H1 | 310 | 561 |
| 32 | g1291521 | 316 | 662 |
| 32 | 030668H1 | 319 | 524 |
| 32 | g897225 | 340 | 705 |
| 32 | g921054 | 340 | 660 |
| 32 | g897232 | 340 | 676 |
| 32 | 5018641T6 | 368 | 996 |
| 32 | g2933440 | 374 | 696 |
| 32 | 1876772T6 | 379 | 940 |
| 32 | g2703395 | 564 | 979 |
| 32 | 2652012T6 | 566 | 930 |
| 32 | g1858336 | 575 | 1000 |
| 32 | 3124683H1 | 622 | 881 |
| 32 | g1313829 | 631 | 867 |
| 32 | 4200739H1 | 671 | 956 |
| 32 | 2244549H1 | 671 | 882 |
| 32 | 2684460H1 | 696 | 909 |
| 33 | g3232386 | 1 | 362 |
| 33 | g3181700 | 7 | 419 |
| 33 | 6109493H1 | 322 | 613 |
| 34 | 3081155F6 | 1 | 417 |
| 34 | 3081155H1 | 2 | 315 |
| 34 | 3081155T6 | 31 | 463 |
| 34 | g1648354 | 58 | 455 |
| 34 | 5800009H1 | 103 | 522 |
| 35 | 3517533R6 | 332 | 653 |
| 35 | 3517533H1 | 332 | 621 |
| 35 | g5178468 | 190 | 667 |
| 35 | 3504115H1 | 162 | 477 |
| 35 | 3082646H1 | 123 | 415 |
| 35 | 259700H1 | 1 | 278 |
| 35 | 7169509H1 | 1 | 477 |
| 35 | 6768733H1 | 58 | 292 |
| 35 | 3176620H1 | 66 | 320 |
| 35 | 3176620F6 | 66 | 551 |
| 35 | 4613367H1 | 72 | 326 |
| 36 | 6753724J1 | 1 | 550 |
| 36 | 6769683J1 | 1 | 595 |
| 36 | 6772986J1 | 3 | 579 |
| 36 | 6769153J1 | 1 | 529 |
| 36 | 6764824J1 | 3 | 589 |
| 36 | g6048166 | 3 | 423 |
| 37 | 653157H1 | 82 | 310 |
| 37 | 509350H1 | 107 | 307 |
| 37 | 3386816H1 | 1 | 183 |
| 37 | 3888124H1 | 4 | 268 |
| 37 | 6779840H1 | 9 | 549 |
| 37 | 3159561H1 | 58 | 220 |
| 37 | 6250084H1 | 67 | 593 |
| 37 | 2809974H1 | 67 | 324 |
| 37 | 3386816F6 | 1 | 622 |
| 37 | 3672749H1 | 81 | 364 |
| 37 | 4005442H1 | 2 | 285 |
| 37 | 70821167V1 | 627 | 1066 |
| 37 | 70822737V1 | 643 | 949 |
| 37 | 70832705V1 | 715 | 823 |
| 37 | 412478T6 | 835 | 1013 |
| 37 | 6779840J1 | 894 | 1315 |
| 37 | g2631213 | 986 | 1049 |
| 37 | 5501816H1 | 1053 | 1261 |
| 37 | 5501816F6 | 1053 | 1293 |
| 37 | 4005442T6 | 487 | 1008 |
| 37 | 70818940V1 | 506 | 1068 |
| 37 | 059074H1 | 601 | 765 |
| 37 | 2862291H1 | 375 | 652 |
| 37 | g3934153 | 376 | 841 |
| 37 | g3900180 | 404 | 840 |
| 37 | 391612F1 | 432 | 1051 |
| 37 | g895347 | 1 | 84 |
| 37 | 4005442F6 | 1 | 326 |
| 37 | 391612R1 | 353 | 898 |
| 37 | 412478R6 | 373 | 699 |
| 37 | 412478H1 | 373 | 600 |
| 37 | 3386816T6 | 337 | 818 |
| 37 | 1951349T6 | 296 | 802 |
| 37 | 6947424H1 | 302 | 813 |
| 38 | 6980110H1 | 1 | 501 |
| 38 | g1897936 | 277 | 634 |
| 38 | 6264019H1 | 282 | 417 |
| 38 | 3099905H1 | 300 | 614 |
| 38 | g2329399 | 438 | 689 |
| 38 | 2821248F6 | 452 | 766 |
| 38 | 2821248H1 | 452 | 755 |
| 38 | g954493 | 494 | 556 |
| 38 | 6291249H1 | 507 | 718 |
| 38 | 5636134H1 | 640 | 912 |
| 38 | 6758395H1 | 658 | 1132 |
| 38 | 1903638H1 | 701 | 954 |
| 38 | 4991026H1 | 847 | 1075 |
| 38 | 4991026F6 | 847 | 1335 |
| 38 | 2821248T6 | 894 | 1434 |
| 38 | 6208066H1 | 893 | 1387 |
| 38 | 4453533H2 | 942 | 1149 |
| 38 | 5621950H1 | 1017 | 1297 |
| 38 | 6827666H1 | 1089 | 1614 |
| 38 | 3165907H1 | 1298 | 1569 |
| 38 | 4982360H1 | 1350 | 1616 |
| 39 | 5998240H1 | 1 | 484 |
| 39 | 458061H1 | 20 | 259 |
| 39 | 455162H1 | 20 | 272 |
| 39 | 460544R6 | 20 | 326 |
| 39 | 455966H1 | 20 | 255 |
| 39 | 455162R6 | 20 | 521 |
| 39 | 460544H1 | 20 | 245 |
| 39 | 3206542H1 | 25 | 202 |
| 39 | 4663964H1 | 37 | 289 |
| 39 | g1807165 | 81 | 278 |
| 39 | g2401959 | 129 | 486 |
| 39 | 3614680H1 | 155 | 272 |
| 39 | g5101146 | 180 | 486 |
| 40 | 6927079H1 | 1 | 400 |
| 40 | g922215 | 84 | 386 |
| 40 | g922268 | 84 | 327 |
| 40 | g991321 | 109 | 483 |
| 40 | 4991883T6 | 268 | 799 |
| 40 | 1958936H1 | 672 | 848 |
| 41 | 6033171H1 | 1 | 434 |
| 41 | g1648352 | 23 | 428 |
| 41 | 3023715H1 | 184 | 448 |
| 41 | 2071327F6 | 285 | 584 |
| 41 | 2071327H1 | 285 | 475 |
| 41 | 6912958J1 | 351 | 944 |
| 41 | 4583753H1 | 378 | 666 |
| 41 | 2071327T6 | 676 | 1111 |
| 41 | g4176194 | 713 | 1156 |
| 41 | g3178308 | 731 | 1151 |
| 41 | g4149782 | 824 | 1142 |
| 41 | 6912958H1 | 837 | 1307 |
| 41 | g3797002 | 974 | 1088 |
| 41 | g3180193 | 1135 | 1214 |
| 42 | 6937854H1 | 1927 | 2414 |
| 42 | 7032292H1 | 1837 | 2263 |
| 42 | 7002267H1 | 1385 | 1996 |
| 42 | 7153478H1 | 1986 | 2456 |
| 42 | 7100968H1 | 1404 | 1874 |
| 42 | 7035269H1 | 1372 | 1791 |
| 42 | 7166089H1 | 1147 | 1690 |
| 42 | 5637088H1 | 1339 | 1516 |
| 42 | 6778731H1 | 949 | 1515 |
| 42 | 2689778H1 | 1187 | 1439 |
| 42 | 4293860F6 | 818 | 1413 |
| 42 | 5975002H1 | 2124 | 2431 |
| 42 | g1423371 | 869 | 1290 |
| 42 | g3424813 | 874 | 1290 |
| 42 | g1859062 | 1009 | 1290 |
| 42 | 1809216F6 | 809 | 1271 |
| 42 | 1809216H1 | 1109 | 1271 |
| 42 | 4290553H1 | 911 | 1161 |
| 42 | 6932930H1 | 733 | 1101 |
| 42 | g1858731 | 690 | 1070 |
| 42 | 4293860H1 | 818 | 1065 |
| 42 | 4042230H1 | 673 | 849 |
| 42 | g1423374 | 236 | 722 |
| 42 | 6132451H1 | 275 | 568 |
| 42 | 6781622H1 | 1 | 541 |
| 42 | 5966128H1 | 192 | 357 |
| 43 | 117874R6 | 1 | 438 |
| 43 | 4229003F6 | 171 | 674 |
| 43 | 4229003T6 | 271 | 738 |
| 43 | g3895952 | 404 | 823 |
| 44 | g3803941 | 113 | 583 |
| 44 | g3805589 | 75 | 524 |
| 44 | g3917967 | 73 | 520 |
| 44 | 3817246H1 | 28 | 320 |
| 44 | 2895718H1 | 1 | 283 |
| 45 | 4295967F8 | 1 | 404 |
| 45 | g5811741 | 166 | 582 |
| 46 | 6708077H1 | 547 | 1179 |
| 46 | 5352502H1 | 578 | 664 |
| 46 | 6819988J1 | 1 | 605 |
| 46 | 6292367H1 | 493 | 609 |
| 46 | g4900516 | 542 | 664 |
| 47 | 2607525T6 | 1 | 557 |
| 48 | 5120882F6 | 1 | 353 |
| 48 | g4072524 | 256 | 619 |
| 49 | 4936033R6 | 591 | 1027 |
| 49 | 5387945T6 | 1 | 633 |
| 50 | 5401502T6 | 1 | 364 |
| 51 | 2205615T6 | 377 | 901 |
| 51 | 4150193F6 | 1 | 509 |
| 52 | g2005559 | 1 | 239 |
| 52 | 1399832H1 | 1 | 227 |
| 52 | 1398471H1 | 1 | 238 |
| 52 | g2027783 | 1 | 329 |
| 52 | 1322674H1 | 2 | 254 |
| 52 | g2278640 | 13 | 442 |
| 52 | g2159473 | 86 | 551 |
| 52 | g2162158 | 123 | 594 |
| 52 | g2156015 | 131 | 366 |
| 52 | g2156002 | 208 | 366 |
| 52 | g1954430 | 228 | 425 |
| 53 | 2737435F6 | 1 | 479 |
| 53 | 2737435T6 | 398 | 597 |
| 54 | 4654776T6 | 126 | 637 |
| 54 | 3796761F6 | 1 | 403 |
| 54 | 3796761H1 | 1 | 306 |
| 54 | 4654776H1 | 34 | 285 |
| 54 | 4654776F6 | 34 | 415 |
| 54 | 1729735H1 | 52 | 280 |
| 54 | g895564 | 59 | 388 |
| 55 | 2920075R6 | 1 | 427 |
| 55 | 784499T6 | 20 | 470 |
| 55 | 2920075H1 | 169 | 427 |
| 55 | 269219H1 | 211 | 414 |
| 55 | 269219R1 | 212 | 754 |
| 55 | g1978467 | 356 | 665 |
| 56 | 6183766H1 | 1 | 267 |
| 56 | g1897936 | 1 | 354 |
| 56 | 3099905H1 | 19 | 334 |
| 56 | g2329399 | 158 | 409 |
| 56 | 2821248F6 | 172 | 486 |
| 56 | 2821248H1 | 172 | 475 |
| 56 | g954493 | 214 | 276 |
| 56 | 6291249H1 | 227 | 438 |
| 56 | 5636134H1 | 360 | 632 |
| 56 | 1903638H1 | 421 | 674 |
| 56 | 4991026F6 | 567 | 1055 |
| 56 | 4991026H1 | 567 | 795 |
| 56 | 6208066H1 | 659 | 1163 |
| 56 | 2821248T6 | 614 | 1154 |
| 56 | 4453533H2 | 662 | 869 |
| 56 | 5621950H1 | 737 | 1017 |
| 56 | 3165907H1 | 1018 | 1289 |
| 56 | 4982360H1 | 1070 | 1335 |
| 56 | 6417723H1 | 1325 | 1610 |
| 57 | 6061626H1 | 753 | 1059 |
| 57 | 5425067H1 | 798 | 1041 |
| 57 | 6331039H1 | 50 | 618 |
| 57 | 6132218H1 | 689 | 951 |
| 57 | 3499278F6 | 482 | 891 |
| 57 | 3499278H1 | 645 | 891 |
| 57 | 4657265H1 | 310 | 411 |
| 57 | 6309037H1 | 233 | 724 |
| 57 | 6538713H1 | 284 | 682 |
| 57 | g1962414 | 304 | 564 |
| 57 | g1376321 | 264 | 526 |
| 57 | g4110945 | 3 | 417 |
| 57 | g4310623 | 1 | 416 |
| 57 | g2733078 | 2 | 384 |
| 57 | g2835164 | 3 | 383 |
| 57 | g3241486 | 1 | 382 |
| 57 | g1376322 | 2 | 296 |
| 57 | 3351668F6 | 1 | 267 |
| 57 | 3351668H1 | 1 | 264 |
| 57 | 1785191H1 | 10 | 194 |
| 57 | g2198029 | 1 | 129 |
| 57 | 4050289H1 | 28 | 127 |
| 57 | 4144289H1 | 20 | 125 |
| 58 | g1979821 | 1 | 188 |
| 58 | g3835204 | 1 | 325 |
| 58 | g4072180 | 19 | 468 |
| 58 | 3519808H1 | 81 | 367 |
| 58 | g843784 | 232 | 499 |
| 58 | 1614746F6 | 288 | 732 |
| 58 | 1614746H1 | 288 | 505 |
| 58 | 1575232H1 | 365 | 577 |
| 58 | g2209653 | 403 | 912 |
| 58 | 6322462H1 | 520 | 718 |
| 58 | 2892611T6 | 645 | 1136 |
| 58 | 1614746T6 | 733 | 1148 |
| 58 | g3644249 | 766 | 1189 |
| 58 | 670448R6 | 800 | 1186 |
| 58 | 677184R6 | 800 | 1152 |
| 58 | 670448T6 | 800 | 1149 |
| 58 | 677184H1 | 800 | 1071 |
| 58 | 670448H1 | 800 | 1055 |
| 58 | g2810503 | 840 | 1186 |
| 58 | g2336018 | 907 | 1187 |
| 58 | 2892611H1 | 945 | 1178 |
| 58 | 1289991H1 | 1081 | 1187 |
| 59 | g3838936 | 83 | 488 |
| 59 | g4085429 | 126 | 588 |
| 59 | g1148294 | 133 | 524 |
| 59 | g3057535 | 162 | 618 |
| 59 | 6429507H1 | 305 | 589 |
| 59 | 2865771F6 | 460 | 851 |
| 59 | 2865771H1 | 460 | 746 |
| 59 | 3639153H1 | 501 | 824 |
| 59 | g1258980 | 584 | 839 |
| 59 | 3569914F6 | 601 | 1111 |
| 59 | 3569914H1 | 601 | 894 |
| 59 | 3569914T6 | 962 | 1569 |
| 59 | 5327014H1 | 1048 | 1291 |
| 59 | 1320957H1 | 1120 | 1353 |
| 59 | 2971828F6 | 1216 | 1745 |
| 59 | g3049125 | 1226 | 1757 |
| 59 | 3077923H1 | 1284 | 1572 |
| 59 | g4069747 | 1301 | 1758 |
| 59 | g3417824 | 1307 | 1758 |
| 59 | 5732379H1 | 1398 | 1646 |
| 59 | 5732479H1 | 1399 | 1592 |
| 59 | 2971828H2 | 1452 | 1745 |
| 59 | g1201083 | 1580 | 1748 |
| 59 | 4459657H1 | 1655 | 1775 |
| 60 | 60206922U1 | 296 | 954 |
| 60 | 368741T6 | 399 | 902 |
| 60 | 368741R6 | 1 | 397 |
| 60 | 368741H1 | 1 | 308 |
| 60 | g4187853 | 375 | 750 |
| 60 | 368741R1 | 1 | 490 |
| 60 | g3838805 | 409 | 751 |
| 61 | 5963989H1 | 1 | 502 |
| 61 | 3593809H1 | 1 | 298 |
| 61 | g1059739 | 1 | 137 |
| 61 | 1850713F6 | 1 | 298 |
| 61 | 1850713H1 | 1 | 241 |
| 62 | 2872408F6 | 1 | 397 |
| 62 | 2872408H1 | 367 | 653 |
| 62 | 2872408T6 | 33 | 629 |
| 63 | 2862618T6 | 1 | 569 |
| 63 | 2838402H2 | 1 | 252 |
| 63 | 287364H1 | 1723 | 2056 |
| 63 | 2867867H1 | 198 | 481 |
| 63 | 2828380H1 | 522 | 792 |
| 63 | 2881835T6 | 606 | 1167 |
| 64 | 2882345T6 | 1809 | 2320 |
| 64 | 2820130T6 | 1421 | 1994 |
| 64 | 2837371H1 | 450 | 548 |
| 65 | 2222227T6 | 809 | 1284 |
| 66 | 270908H1 | 1 | 102 |
| 66 | 2698411H1 | 102 | 402 |
| 66 | 269967H1 | 55 | 354 |
| 66 | 2778926H1 | 24 | 260 |
| 66 | 2737435H1 | 1 | 207 |
| 66 | 2737435F6 | 19 | 501 |
| 66 | 2753160H1 | 1 | 119 |
| 66 | 2718845H1 | 1 | 245 |
| 66 | 2718845F6 | 1 | 395 |
| 66 | 2729146H1 | 107 | 344 |
| 66 | 2690266H1 | 126 | 385 |
| 66 | 2782984H1 | 438 | 571 |
| 66 | 2737435T6 | 420 | 617 |
| 67 | 2666231T6 | 1 | 523 |
| 68 | 1729868T6 | 1414 | 1975 |
| 69 | 3256037T6 | 1397 | 1940 |
| 70 | 3394349T6 | 33 | 600 |
| 71 | 5387945T6 | 685 | 1317 |
| 72 | 394892F1 | 793 | 1443 |
| 72 | 402386T6 | 930 | 1401 |
| 73 | 3318809F6 | 1 | 438 |
| 73 | 3318809H1 | 3 | 276 |
| 73 | 3318809T6 | 227 | 754 |
| 73 | 3255863H1 | 438 | 688 |
| 74 | 3685359H1 | 1 | 303 |
| 74 | 3685359F6 | 42 | 501 |
| 74 | 3685359T6 | 1 | 279 |
| 75 | 3637162H1 | 1 | 292 |
| 75 | 3637162F6 | 38 | 490 |
| 75 | 3699637H1 | 22 | 182 |
| 75 | 3637162T6 | 192 | 740 |
| 76 | 2007652H1 | 225 | 411 |
| 76 | 2007652T6 | 225 | 449 |
| 76 | 2007652R6 | 225 | 480 |
| 77 | 3325402T7 | 1764 | 2221 |
| 78 | 4654776F6 | 34 | 415 |
| 78 | 4654776H1 | 34 | 285 |
| 78 | 4654776T6 | 126 | 637 |
| 79 | 1476477F6 | 1 | 548 |
| 79 | 1476477H1 | 1 | 205 |
| 79 | 1476477H6 | 1 | 207 |
| 79 | 1476485H1 | 1 | 85 |
| 79 | 1476477T6 | 120 | 639 |
| 79 | 1500139H1 | 86 | 292 |
| 79 | 1496323H1 | 591 | 830 |
| 80 | 5200862H1 | 1 | 220 |
| 80 | 5200862F6 | 1 | 508 |
| 80 | 5200862T6 | 371 | 989 |
| 81 | 450278R6 | 619 | 1125 |
| 81 | 448904R6 | 1 | 390 |
| 81 | 450278R7 | 619 | 1046 |
| 81 | 448904H1 | 1 | 216 |
| 81 | 446282H1 | 1 | 256 |
| 81 | 450278H1 | 1 | 198 |
| 81 | 448904T6 | 721 | 1298 |
| 81 | 450278T7 | 788 | 1297 |
| 82 | 807409T6 | 210 | 590 |
| 82 | 807409R6 | 210 | 629 |
| 82 | 807409H1 | 1 | 78 |
| 83 | 3844814F6 | 147 | 721 |
| 83 | 3844814H1 | 433 | 721 |
| 83 | 3779417H1 | 1 | 204 |
| 83 | 3769201H1 | 63 | 208 |
| 83 | 3844814T6 | 63 | 317 |
| 84 | 1224910R6 | 1 | 543 |
| 84 | 1224910H1 | 881 | 1024 |
| 84 | 1224910T6 | 98 | 446 |
| 85 | 5296190T6 | 1523 | 1959 |
| 86 | 70375800D1 | 365 | 741 |
| 86 | 5884784H1 | 1617 | 1830 |
| 86 | 60203053V1 | 286 | 730 |
| 86 | 60203050V1 | 304 | 692 |
| 86 | 70374630D1 | 304 | 668 |
| 86 | 60209436U1 | 1 | 656 |
| 86 | 70373679D1 | 378 | 626 |
| 86 | 70373094D1 | 400 | 786 |
| 86 | 70375597D1 | 303 | 605 |
| 86 | 70373898D1 | 304 | 437 |
| 86 | 70373514D1 | 304 | 437 |
| 86 | 819073H1 | 1256 | 1510 |
| 86 | 2831185H1 | 1233 | 1479 |
| 86 | 70375782D1 | 380 | 772 |
| 86 | 70374947D1 | 304 | 772 |
| 86 | g824801 | 1579 | 1852 |
| 86 | 70376281D1 | 472 | 766 |
| 86 | 60209435U1 | 102 | 747 |
| 86 | g2780043 | 1733 | 2066 |
| 86 | 2751856R6 | 1651 | 2039 |
| 86 | 70374895D1 | 404 | 947 |
| 86 | 70376064D1 | 393 | 947 |
| 86 | 70374077D1 | 472 | 947 |
| 86 | 70373091D1 | 669 | 947 |
| 86 | 70373401D1 | 782 | 947 |
| 86 | 70376523D1 | 789 | 947 |
| 86 | 70375900D1 | 868 | 946 |
| 86 | 3999158H1 | 1844 | 1992 |
| 86 | 70376383D1 | 606 | 867 |
| 86 | 2751856H1 | 1651 | 1923 |
| 86 | 70374800D1 | 304 | 837 |
| 86 | 2751062H1 | 1651 | 1919 |
| 86 | 70373252D1 | 300 | 800 |
| 86 | 70375702D1 | 340 | 800 |
| 86 | 60203054V1 | 353 | 791 |
| 86 | 70373230D1 | 359 | 787 |
| 86 | 5822141H1 | 1871 | 2175 |
| 86 | 6332621H1 | 626 | 1098 |
| 86 | 1689922F6 | 1942 | 2175 |
| 86 | 5820119H1 | 1871 | 2166 |
| 86 | g4222747 | 1715 | 2166 |
| 86 | g3594875 | 1710 | 2160 |
| 86 | g3751911 | 1700 | 2160 |
| 86 | g3847457 | 1754 | 2160 |
| 86 | g2675135 | 1863 | 2160 |
| 86 | g4524280 | 1891 | 2160 |
| 86 | g3422353 | 1857 | 2153 |
| 86 | 1689922H1 | 1942 | 2151 |
| 86 | g1501747 | 1770 | 2146 |
| 86 | g2342389 | 1928 | 2145 |
| 86 | g846897 | 1832 | 2132 |
| 86 | g4264802 | 1694 | 2117 |
| 86 | g3693061 | 1788 | 2117 |
| 86 | g4269694 | 1799 | 2117 |
| 86 | g2269848 | 1756 | 2117 |
| 86 | g824800 | 1834 | 2117 |
| 86 | g3069508 | 1651 | 2117 |
| 86 | g2055928 | 1783 | 2117 |
| 86 | g2539104 | 1673 | 2117 |
| 86 | g2901266 | 2005 | 2113 |
| 86 | 70375731D1 | 590 | 1018 |
| 86 | g4390710 | 1751 | 2184 |
| 87 | 5059054H1 | 1 | 257 |
| 87 | 5059022F9 | 1 | 581 |
| 87 | 179544R6 | 84 | 529 |
| 87 | 1227952T6 | 125 | 595 |
| 87 | 064418H1 | 286 | 457 |
| 87 | 179544H1 | 329 | 529 |
| 87 | g1011391 | 482 | 807 |
| 87 | 4667922H1 | 539 | 759 |
| 88 | g4189831 | 12 | 63 |
| 88 | 4721701H1 | 360 | 439 |
| 88 | 3123901H1 | 1 | 66 |
| 88 | 6785315H1 | 12 | 481 |
| 88 | 7201126H2 | 51 | 570 |
| 89 | 2327449H1 | 15 | 248 |
| 89 | 2327457T6 | 1 | 364 |
| 89 | 2327449T6 | 1 | 288 |
| 89 | 2327449R6 | 13 | 408 |
| 89 | 2327457R6 | 13 | 402 |
| 90 | g3694145 | 26 | 408 |
| 90 | 6779728J1 | 1 | 370 |
| 90 | g3250058 | 1 | 408 |
| 90 | 6245903H1 | 120 | 532 |
| 90 | g4333202 | 140 | 407 |
| 91 | 1895443H1 | 19 | 272 |
| 91 | 4729485H1 | 86 | 235 |
| 91 | 5217490H1 | 1 | 198 |
| 91 | 1542833H1 | 1 | 137 |
| 91 | 3836068F6 | 7 | 546 |
| 91 | 1891884H1 | 19 | 264 |
| 91 | 3052342H1 | 46 | 335 |
| 91 | 5735738H1 | 78 | 348 |
| 91 | g5661058 | 155 | 347 |
| 91 | 3525414H1 | 171 | 494 |
| 91 | 3836068H1 | 7 | 289 |
| 92 | 1335071H1 | 515 | 737 |
| 92 | 1353732H1 | 535 | 775 |
| 92 | 6166536H1 | 736 | 1266 |
| 92 | 6483617F9 | 808 | 1320 |
| 92 | 6483617F8 | 828 | 1386 |
| 92 | 4326477F6 | 1 | 381 |
| 92 | 4326477H1 | 2 | 160 |
| 92 | 4140846T9 | 26 | 550 |
| 92 | 3888314H1 | 52 | 314 |
| 92 | 7073510H1 | 119 | 689 |
| 92 | 7081835H1 | 125 | 678 |
| 92 | 2079383H1 | 301 | 563 |
| 92 | 6405368H1 | 315 | 599 |
| 92 | 7254119H1 | 491 | 935 |
| 92 | 6420281H1 | 653 | 1159 |
| 92 | 6759433J1 | 668 | 1118 |
| 92 | 6483617H1 | 808 | 1319 |
| 93 | 257941R6 | 1 | 252 |
| 93 | 2764170H1 | 19 | 259 |
| 93 | 7040554H1 | 149 | 692 |
| 93 | 6477351H1 | 541 | 1039 |
| 93 | g3163349 | 590 | 1022 |
| 93 | 3209591H1 | 1 | 149 |
| 93 | 5511002H1 | 628 | 880 |
| 93 | 5767313H1 | 1 | 246 |
| 93 | 000413H1 | 1 | 241 |
| 93 | 257941H1 | 1 | 237 |
| 93 | 2727658H1 | 1 | 173 |
| 93 | 5511002F6 | 628 | 905 |
| 93 | g1977359 | 11 | 218 |
| 94 | 894136H1 | 1 | 167 |
| 94 | 893591H1 | 1 | 280 |
| 94 | 3685359F6 | 21 | 480 |
| 94 | 3685359H1 | 21 | 323 |
| 94 | 3685359T6 | 243 | 521 |
| 95 | g1925745 | 1 | 143 |
| 95 | g2752333 | 16 | 387 |
| 95 | g2881366 | 16 | 370 |
| 95 | 3257022H1 | 28 | 287 |
| 95 | 2380565F6 | 186 | 681 |
| 95 | 2380565H1 | 186 | 401 |
| 95 | 6354028H1 | 192 | 471 |
| 95 | 2809746H1 | 248 | 487 |
| 95 | 5110009H1 | 249 | 500 |
| 95 | 5110002H1 | 249 | 441 |
| 95 | 6354128H1 | 326 | 480 |
| 95 | 1546477H1 | 378 | 584 |
| 95 | 5055767H1 | 565 | 845 |
| 95 | 3413877H1 | 572 | 817 |
| 95 | 2360256R6 | 719 | 1123 |
| 95 | 2360256H1 | 719 | 976 |
| 95 | g1688388 | 781 | 1110 |
| 95 | 1330559H1 | 784 | 1027 |
| 95 | g844802 | 968 | 1283 |
| 95 | g1640803 | 1007 | 1243 |
| 96 | 4895030H1 | 2484 | 2784 |
| 96 | g1941651 | 2486 | 2951 |
| 96 | 70657184V1 | 2503 | 3092 |
| 96 | g658182 | 2512 | 2776 |
| 96 | g2718978 | 2525 | 2989 |
| 96 | g715365 | 2538 | 2875 |
| 96 | 5298571H1 | 2539 | 2819 |
| 96 | 4749511H1 | 2540 | 2838 |
| 96 | 5298771H1 | 2539 | 2804 |
| 96 | 5298612H1 | 2540 | 2664 |
| 96 | 6041370H1 | 2550 | 3199 |
| 96 | g1471133 | 2556 | 2990 |
| 96 | 6555238H1 | 2565 | 3127 |
| 96 | 6556278H1 | 2565 | 3092 |
| 96 | 2913641H1 | 2604 | 2878 |
| 96 | 5825362H1 | 2609 | 3122 |
| 96 | 6400248H1 | 2624 | 2806 |
| 96 | g1719353 | 2634 | 3091 |
| 96 | g1960091 | 2671 | 3185 |
| 96 | 6829782H1 | 2683 | 3131 |
| 96 | 6829782J1 | 2683 | 3131 |
| 96 | g6139947 | 2710 | 2989 |
| 96 | 70839657V1 | 2744 | 3193 |
| 96 | 70657566V1 | 2815 | 3435 |
| 96 | 2367903F6 | 2842 | 3294 |
| 96 | 2367903H1 | 2842 | 3079 |
| 96 | 2598088T6 | 2849 | 3428 |
| 96 | 2370164T6 | 2863 | 3400 |
| 96 | 7339911H1 | 2891 | 3434 |
| 96 | 494011F1 | 2890 | 3445 |
| 96 | 70658592V1 | 2911 | 3534 |
| 96 | 1398685H1 | 2935 | 3187 |
| 96 | 70656953V1 | 2938 | 3555 |
| 96 | 1380634H1 | 2939 | 3189 |
| 96 | 5138789H1 | 2949 | 3229 |
| 96 | 70655570V1 | 2957 | 3552 |
| 96 | 5067594H1 | 2958 | 3147 |
| 96 | 494011T6 | 2971 | 3405 |
| 96 | g2051891 | 2978 | 3448 |
| 96 | 6850945H1 | 2986 | 3519 |
| 96 | g4738083 | 2987 | 3447 |
| 96 | 6489656H1 | 2997 | 3108 |
| 96 | g3419253 | 3004 | 3445 |
| 96 | g5656805 | 3025 | 3445 |
| 96 | g1444847 | 3030 | 3446 |
| 96 | g3416160 | 3047 | 3449 |
| 96 | g1719354 | 3058 | 3454 |
| 96 | g1780421 | 3068 | 3450 |
| 96 | 6937801H1 | 3118 | 3682 |
| 96 | 6500625H1 | 3113 | 3727 |
| 96 | g654349 | 3148 | 3441 |
| 96 | g5747781 | 3156 | 3445 |
| 96 | g758975 | 3157 | 3485 |
| 96 | g564984 | 3156 | 3445 |
| 96 | g1357788 | 3163 | 3465 |
| 96 | g2931035 | 3178 | 3445 |
| 96 | 155875T6 | 3180 | 3849 |
| 96 | 3874011H1 | 3185 | 3455 |
| 96 | g1190099 | 3218 | 3440 |
| 96 | 3117949H1 | 3251 | 3435 |
| 96 | 2756752H1 | 3308 | 3580 |
| 96 | 70837859V1 | 3306 | 3896 |
| 96 | 495759F1 | 3326 | 3893 |
| 96 | 1332986T6 | 3341 | 3399 |
| 96 | 3297117H1 | 3428 | 3687 |
| 96 | g2959267 | 3429 | 3904 |
| 96 | g3836196 | 3462 | 3898 |
| 96 | 154612T6 | 3493 | 3858 |
| 96 | g2877501 | 3517 | 3898 |
| 96 | g3838447 | 3541 | 3898 |
| 96 | g1187596 | 3595 | 3893 |
| 96 | 7004590H1 | 3601 | 3894 |
| 96 | 6192804H1 | 3620 | 3893 |
| 96 | 6194735H1 | 3620 | 3893 |
| 96 | 6194703H1 | 3619 | 3877 |
| 96 | 495759T6 | 3642 | 3849 |
| 96 | g4737879 | 3648 | 3893 |
| 96 | g758939 | 3648 | 3873 |
| 96 | g3895731 | 3648 | 3898 |
| 96 | g1079906 | 3666 | 3944 |
| 96 | 767355H1 | 3801 | 4056 |
| 96 | g1115031 | 3911 | 4343 |
| 96 | 7337250H1 | 1 | 574 |
| 96 | 2485552H1 | 46 | 257 |
| 96 | 7235980H1 | 61 | 574 |
| 96 | g3869258 | 202 | 4338 |
| 96 | g3869256 | 202 | 4338 |
| 96 | 2693067H1 | 559 | 813 |
| 96 | 6945783H1 | 613 | 1122 |
| 96 | 2535607H1 | 838 | 1099 |
| 96 | 70837439V1 | 956 | 1519 |
| 96 | 3502278H1 | 1050 | 1359 |
| 96 | g1779649 | 1215 | 1673 |
| 96 | 60209482U1 | 1264 | 1763 |
| 96 | 495759R1 | 1304 | 1782 |
| 96 | 495759R6 | 1305 | 1682 |
| 96 | 495759H1 | 1305 | 1559 |
| 96 | 70375665D1 | 1438 | 2033 |
| 96 | 60207458U1 | 1487 | 2000 |
| 96 | 60209492U1 | 1489 | 2005 |
| 96 | 60209480U1 | 1489 | 1845 |
| 96 | 7006928H1 | 1535 | 1890 |
| 96 | 70375676D1 | 1644 | 2122 |
| 96 | 70375660D1 | 1684 | 1921 |
| 96 | 494011R1 | 1689 | 2115 |
| 96 | 494011R6 | 1689 | 2062 |
| 96 | 494011H1 | 1689 | 1921 |
| 96 | g3896433 | 1698 | 2078 |
| 96 | 994895R1 | 1733 | 2255 |
| 96 | 994895H1 | 1733 | 2006 |
| 96 | 680754H1 | 1778 | 2047 |
| 96 | 70374292D1 | 1783 | 2008 |
| 96 | 70375422D1 | 1783 | 2241 |
| 96 | 70375842D1 | 1789 | 2222 |
| 96 | 3488220H1 | 1791 | 2075 |
| 96 | 71220762V1 | 1851 | 2480 |
| 96 | 1332986F6 | 1863 | 2182 |
| 96 | 71221685V1 | 1859 | 2529 |
| 96 | 1332986H1 | 1863 | 2097 |
| 96 | 70838337V1 | 1962 | 2525 |
| 96 | 1964279H1 | 1965 | 2251 |
| 96 | 71221831V1 | 2034 | 2530 |
| 96 | 70375269D1 | 2043 | 2527 |
| 96 | g1357787 | 2095 | 2714 |
| 96 | 5874572H1 | 2106 | 2365 |
| 96 | 71221729V1 | 2117 | 2580 |
| 96 | 70838208V1 | 2146 | 2490 |
| 96 | 2598088F6 | 2168 | 2790 |
| 96 | 2598088H1 | 2168 | 2286 |
| 96 | g573567 | 2168 | 2536 |
| 96 | 6409839H1 | 2218 | 2783 |
| 96 | 5035552H1 | 2282 | 2539 |
| 96 | 70658011V1 | 2283 | 2794 |
| 96 | 70656808V1 | 2299 | 2887 |
| 96 | 1997937R6 | 2308 | 2826 |
| 96 | 1997937H1 | 2308 | 2587 |
| 96 | g3887783 | 2344 | 2793 |
| 96 | 1997937T6 | 2397 | 2962 |
| 96 | g1280977 | 2404 | 2950 |
| 96 | 155875H1 | 2404 | 2627 |
| 96 | 155875R6 | 2404 | 2906 |
| 96 | 70839485V1 | 2403 | 2962 |
| 96 | 6096636H1 | 2466 | 2679 |
| 96 | 7126727H1 | 2484 | 3045 |
| 96 | 5876310H1 | 2484 | 2804 |
| 97 | 4719538H1 | 925 | 1185 |
| 97 | 4911350H1 | 964 | 1239 |
| 97 | 1903472H1 | 984 | 1228 |
| 97 | 3639862H1 | 1027 | 1306 |
| 97 | 4541862F6 | 1034 | 1422 |
| 97 | 6907459H1 | 1061 | 1564 |
| 97 | g5657760 | 1076 | 1506 |
| 97 | 6908516J1 | 1077 | 1642 |
| 97 | 4697720H1 | 1125 | 1372 |
| 97 | 4238385H1 | 1 | 283 |
| 97 | 3403365H1 | 73 | 315 |
| 97 | 3403365F6 | 74 | 334 |
| 97 | 6907459J1 | 151 | 705 |
| 97 | 4551324H1 | 169 | 418 |
| 97 | 3374712H1 | 211 | 466 |
| 97 | 60264809D1 | 228 | 424 |
| 97 | 1954023H1 | 257 | 493 |
| 97 | g792057 | 641 | 899 |
| 97 | 60264821D1 | 680 | 1235 |
| 97 | 60264804D1 | 680 | 1220 |
| 97 | 60264819D1 | 680 | 1192 |
| 97 | g2011093 | 754 | 943 |
| 97 | 069791H1 | 807 | 940 |
| 97 | 4916612H1 | 819 | 1108 |
| 97 | 4916612F7 | 828 | 1360 |
| 97 | 4719538F6 | 925 | 1431 |
| 97 | 6337692H1 | 300 | 461 |
| 97 | 3371311H1 | 544 | 811 |
| 97 | 3091243H1 | 1164 | 1445 |
| 97 | 3915431H1 | 1199 | 1503 |
| 97 | 1954644H1 | 1145 | 1429 |
| 97 | 2596935H1 | 1269 | 1503 |
| 97 | 4719538T6 | 1597 | 1835 |
| 97 | g812717 | 1598 | 1774 |
| 97 | 60100951B1 | 1279 | 1689 |
| 97 | 2410012H1 | 1308 | 1528 |
| 97 | 5781437H1 | 1353 | 1643 |
| 97 | 1499912H1 | 1387 | 1582 |
| 97 | 2777329H1 | 1412 | 1639 |
| 97 | 60100952B1 | 1415 | 1827 |
| 97 | g2577280 | 1497 | 1671 |
| 97 | g3648252 | 1574 | 1704 |
| 97 | g1128730 | 1628 | 1854 |
| 97 | g2837364 | 1650 | 1832 |
| 97 | 60100950D1 | 860 | 1177 |
| 97 | 60100952D1 | 860 | 1116 |
| 97 | 1264982H1 | 895 | 1131 |
| 97 | 6120149H1 | 908 | 1402 |
| 97 | 6119056H1 | 908 | 1530 |
| 97 | 60264817D1 | 625 | 1184 |
| 97 | 60100951D1 | 637 | 929 |
| 98 | 6197337H1 | 1 | 377 |
| 98 | 6198216T8 | 1 | 273 |
| 98 | 6197337F8 | 18 | 368 |
| 98 | 6331250H1 | 213 | 825 |
| 99 | 3016435F6 | 1 | 256 |
| 99 | 3016435H1 | 1 | 138 |
| 99 | 5964071H1 | 28 | 318 |
| 99 | 3016435T6 | 183 | 759 |
| 99 | 2094922H1 | 268 | 318 |
| 99 | 4587201H1 | 585 | 849 |
| 99 | 4762091H1 | 613 | 811 |
| 99 | 1495146R6 | 616 | 1100 |
| 99 | 1495146H1 | 616 | 775 |
| 99 | 5326946H1 | 671 | 928 |
| 99 | 1495146T6 | 681 | 1055 |
| 99 | 3703757H1 | 702 | 1004 |
| 99 | 2948181T6 | 719 | 1062 |
| 99 | 2948181F6 | 726 | 1100 |
| 99 | 2948181H1 | 726 | 983 |
| 99 | g4620028 | 745 | 1100 |
| 99 | g928615 | 748 | 1102 |
| 99 | 677653H1 | 1004 | 1100 |
| 100 | 5901489T6 | 1 | 584 |
| 101 | 2025051T6 | 1192 | 1583 |
| 102 | g2932743 | 1 | 465 |
| 102 | 7165328H1 | 224 | 722 |
| 102 | g5664446 | 237 | 597 |
| 102 | 2863343H1 | 346 | 643 |
| 102 | 4030732H1 | 346 | 455 |
| 102 | 2863343F6 | 346 | 769 |
| 102 | 3323244H1 | 597 | 856 |
| 103 | 4987160F6 | 1 | 601 |
| 103 | 4986076H1 | 251 | 398 |
| 103 | 2753343R6 | 273 | 678 |
| 103 | 2753343H1 | 273 | 523 |
| 103 | 4793432H1 | 351 | 482 |
| 103 | 4793224H1 | 353 | 635 |
| 103 | 2753343T6 | 394 | 811 |
| 103 | 4987160H1 | 1 | 271 |
| 103 | 3343341T6 | 430 | 814 |
| 103 | 4228058H1 | 434 | 708 |
| 103 | 864677H1 | 614 | 856 |
| 103 | 2755913T6 | 618 | 813 |
| 103 | 2755913H1 | 618 | 848 |
| 103 | 2755913R6 | 618 | 847 |
| 103 | 1971855T6 | 627 | 812 |
| 103 | 6161690H1 | 661 | 856 |
| 104 | 1006355H1 | 6597 | 6859 |
| 104 | 3957372H2 | 6610 | 6875 |
| 104 | 186558R6 | 7598 | 8102 |
| 104 | g4838144 | 307 | 6193 |
| 104 | g3847721 | 8369 | 8524 |
| 104 | g3861906 | 8369 | 8524 |
| 104 | 185105H1 | 7598 | 7794 |
| 104 | 186558H1 | 7598 | 7745 |
| 104 | 186558T6 | 7859 | 8487 |
| 104 | g1635936 | 7988 | 8197 |
| 104 | 4619766H1 | 8062 | 8337 |
| 104 | 7356046H1 | 8121 | 8524 |
| 104 | g3797365 | 8183 | 8524 |
| 104 | 6432853H1 | 8263 | 8530 |
| 104 | 6434079H1 | 8263 | 8530 |
| 104 | 756968R6 | 8287 | 8524 |
| 104 | 756968H1 | 8287 | 8518 |
| 104 | g184038 | 1 | 8521 |
| 104 | 7000401H1 | 343 | 428 |
| 104 | 1608059F6 | 445 | 836 |
| 104 | 1608059H1 | 445 | 664 |
| 104 | 2169635F6 | 1141 | 1544 |
| 104 | 2169635H1 | 1141 | 1373 |
| 104 | 2169635T6 | 1716 | 2134 |
| 104 | 7229203H1 | 2112 | 2612 |
| 104 | g314259 | 4291 | 4813 |
| 104 | 3960183H1 | 6436 | 6705 |
| 105 | 70524885V1 | 1630 | 2395 |
| 105 | 70524843V1 | 1639 | 2253 |
| 105 | 6643169V1 | 1689 | 1909 |
| 105 | 70646269V1 | 1689 | 1909 |
| 105 | 70525307V1 | 1716 | 2188 |
| 105 | g880693 | 1746 | 2259 |
| 105 | 70533384V1 | 2383 | 2603 |
| 105 | 2707682T6 | 2410 | 2903 |
| 105 | 70523481V1 | 2420 | 2965 |
| 105 | 70525826V1 | 2426 | 2939 |
| 105 | 70525835V1 | 2426 | 2939 |
| 105 | 70523321V1 | 2540 | 2944 |
| 105 | g875595 | 2611 | 2954 |
| 105 | 70523241V1 | 2671 | 2938 |
| 105 | g561027 | 2772 | 2938 |
| 105 | g875594 | 1746 | 2106 |
| 105 | g669502 | 1745 | 1996 |
| 105 | 70525213V1 | 1780 | 2434 |
| 105 | 70522841V1 | 1864 | 2410 |
| 105 | 70524066V1 | 1885 | 2366 |
| 105 | 70524543V1 | 1916 | 2434 |
| 105 | 7238311H1 | 1931 | 2473 |
| 105 | 70522425V1 | 1952 | 2725 |
| 105 | 70525244V1 | 2005 | 2625 |
| 105 | 70526939V1 | 2013 | 2610 |
| 105 | 70526388V1 | 2192 | 2409 |
| 105 | 70524889V1 | 2198 | 2767 |
| 105 | 70526612V1 | 2200 | 2358 |
| 105 | 70522907V1 | 2239 | 2973 |
| 105 | 70522785V1 | 2248 | 2927 |
| 105 | 70526373V1 | 2260 | 2416 |
| 105 | 7086069H1 | 2358 | 2898 |
| 105 | 7071063H1 | 1 | 547 |
| 105 | g913241 | 159 | 2181 |
| 105 | g6299529 | 164 | 599 |
| 105 | 7091369H1 | 245 | 847 |
| 105 | 7347105H1 | 266 | 460 |
| 105 | 5312260H1 | 357 | 578 |
| 105 | 7090770H1 | 1143 | 1683 |
| 105 | 70525682V1 | 1204 | 1896 |
| 105 | 70526748V1 | 1205 | 1699 |
| 105 | 2707682H1 | 1213 | 1477 |
| 105 | 2707682F6 | 1213 | 1439 |
| 105 | 70522990V1 | 1214 | 1837 |
| 105 | 1569986H1 | 1252 | 1374 |
| 105 | 70529862V1 | 1437 | 1903 |
| 105 | 70522200V1 | 1481 | 2029 |
| 105 | 70525480V1 | 1546 | 2185 |
| 105 | 6449560H1 | 1564 | 2157 |
| 106 | 3408296H1 | 1562 | 1812 |
| 106 | 3173959T6 | 1584 | 2175 |
| 106 | 2298374R6 | 1623 | 2077 |
| 106 | 2298374H1 | 1623 | 1895 |
| 106 | 1361272F1 | 1657 | 2216 |
| 106 | 1361366H1 | 1657 | 1834 |
| 106 | 1683557F6 | 1671 | 2227 |
| 106 | 1683573F6 | 1671 | 2086 |
| 106 | 1683573H1 | 1671 | 1907 |
| 106 | 1336611H1 | 1698 | 1941 |
| 106 | 71265365V1 | 1447 | 1892 |
| 106 | 70062844V1 | 1469 | 1865 |
| 106 | 2273538H1 | 1494 | 1763 |
| 106 | 3022474H1 | 1540 | 1833 |
| 106 | 71120676V1 | 1546 | 1932 |
| 106 | 70524882V1 | 1559 | 1725 |
| 106 | 70528634V1 | 558 | 1205 |
| 106 | 2408847H1 | 1882 | 2132 |
| 106 | 70059242V1 | 1888 | 2222 |
| 106 | g5855887 | 1901 | 2223 |
| 106 | g5858285 | 1901 | 2224 |
| 106 | 3409241T6 | 1911 | 2367 |
| 106 | 5669576H1 | 1931 | 2121 |
| 106 | 70062956V1 | 1793 | 2090 |
| 106 | 70061871V1 | 1800 | 2151 |
| 106 | 4778510H1 | 1802 | 2080 |
| 106 | 70061698V1 | 1811 | 2222 |
| 106 | g4901915 | 1816 | 2222 |
| 106 | 70060889V1 | 1815 | 2268 |
| 106 | 1623591T6 | 1819 | 2177 |
| 106 | 1915736T6 | 1818 | 2176 |
| 106 | g3155476 | 1821 | 2208 |
| 106 | g5392637 | 1826 | 2222 |
| 106 | 70061837V1 | 1835 | 2222 |
| 106 | 1623591F6 | 1853 | 2222 |
| 106 | 1623591H1 | 1853 | 2074 |
| 106 | g2198272 | 1858 | 2220 |
| 106 | 960516R1 | 1859 | 2222 |
| 106 | 70062540V1 | 1860 | 2222 |
| 106 | 960516H1 | 1859 | 2160 |
| 106 | 960387T1 | 1859 | 2185 |
| 106 | 2086141H1 | 1864 | 2127 |
| 106 | 4239442T8 | 1884 | 2294 |
| 106 | 5376913H1 | 683 | 950 |
| 106 | 2557738H1 | 650 | 892 |
| 106 | 2560627H1 | 650 | 911 |
| 106 | 1853191F6 | 1706 | 2218 |
| 106 | 1853191H1 | 1706 | 1960 |
| 106 | 1632340H1 | 1705 | 1922 |
| 106 | 614199H1 | 1706 | 1933 |
| 106 | 70059326V1 | 1719 | 2222 |
| 106 | 1683573T6 | 1725 | 2175 |
| 106 | 3751266T6 | 1725 | 2187 |
| 106 | 3321818T6 | 1730 | 2185 |
| 106 | 70062398V1 | 1341 | 1862 |
| 106 | 71118139V1 | 1346 | 1909 |
| 106 | 1865168H1 | 1348 | 1605 |
| 106 | 71294927V1 | 1403 | 1816 |
| 106 | 71120506V1 | 1404 | 1857 |
| 106 | 71118652V1 | 1408 | 2023 |
| 106 | 71266623V1 | 1448 | 1751 |
| 106 | 71265047V1 | 731 | 1261 |
| 106 | 71119759V1 | 731 | 1234 |
| 106 | 71266124V1 | 732 | 1366 |
| 106 | 71118641V1 | 731 | 1311 |
| 106 | 71118731V1 | 731 | 1292 |
| 106 | 71265792V1 | 731 | 1260 |
| 106 | 1915736R6 | 731 | 1137 |
| 106 | 2681128H1 | 696 | 984 |
| 106 | 70531848V1 | 706 | 1260 |
| 106 | 71264971V1 | 725 | 1481 |
| 106 | 71266413V1 | 922 | 1608 |
| 106 | 71117117V1 | 921 | 1580 |
| 106 | 3672409H1 | 937 | 1168 |
| 106 | 71118560V1 | 968 | 1537 |
| 106 | 71119741V1 | 973 | 1452 |
| 106 | 3964084H1 | 1006 | 1294 |
| 106 | 3628624H1 | 1936 | 2251 |
| 106 | g2969311 | 1938 | 2222 |
| 106 | g3151378 | 1960 | 2226 |
| 106 | g1980460 | 1995 | 2313 |
| 106 | 223027R1 | 2064 | 2222 |
| 106 | 223027H1 | 2063 | 2222 |
| 106 | 223027F1 | 2064 | 2222 |
| 106 | 70529734V1 | 461 | 579 |
| 106 | g850466 | 493 | 824 |
| 106 | 70530256V1 | 467 | 1041 |
| 106 | 3751266F6 | 1 | 358 |
| 106 | 3751266H1 | 1 | 296 |
| 106 | 3321818F6 | 103 | 497 |
| 106 | 3321818H1 | 104 | 350 |
| 106 | 6351045H2 | 329 | 660 |
| 106 | 71265775V1 | 801 | 1368 |
| 106 | 4177726H1 | 808 | 1103 |
| 106 | 5296714H1 | 766 | 1037 |
| 106 | 7059995H1 | 799 | 1271 |
| 106 | 096309H1 | 1101 | 1323 |
| 106 | 71118507V1 | 1118 | 1700 |
| 106 | 71120385V1 | 1121 | 1448 |
| 106 | g2198304 | 1133 | 1220 |
| 106 | 71119740V1 | 1134 | 1424 |
| 106 | 4174878H1 | 1137 | 1420 |
| 106 | 71117317V1 | 1153 | 1724 |
| 106 | 71119085V1 | 1197 | 1825 |
| 106 | 3792653H1 | 1224 | 1433 |
| 106 | 6329373H1 | 1235 | 1780 |
| 106 | 71119545V1 | 1267 | 1954 |
| 106 | 71120838V1 | 1275 | 1741 |
| 106 | 4717156H1 | 1277 | 1501 |
| 106 | 5391806H1 | 1282 | 1481 |
| 106 | 71118747V1 | 1295 | 1960 |
| 106 | 70527304V1 | 1301 | 1969 |
| 106 | 71120713V1 | 1306 | 1885 |
| 106 | 71118117V1 | 1311 | 1871 |
| 106 | 5290693H1 | 1314 | 1610 |
| 106 | 5287845H1 | 1314 | 1441 |
| 106 | 70530468V1 | 1320 | 1851 |
| 106 | 3173959F6 | 1322 | 1886 |
| 106 | 70061612V1 | 1322 | 1882 |
| 106 | 70059581V1 | 1322 | 1815 |
| 106 | 70058920V1 | 1322 | 1762 |
| 106 | 70060883V1 | 1322 | 1729 |
| 106 | 2298374T6 | 1735 | 2182 |
| 106 | 70061519V1 | 1747 | 2333 |
| 106 | 3021149H1 | 1758 | 2047 |
| 106 | g2879046 | 1775 | 2225 |
| 106 | 1853191T6 | 1781 | 2376 |
| 106 | g2444573 | 1794 | 2221 |
| 106 | 3934758F6 | 895 | 1411 |
| 106 | 70527491V1 | 846 | 1499 |
| 106 | 71119165V1 | 884 | 1492 |
| 106 | 71265279V1 | 889 | 1575 |
| 106 | 71264808V1 | 753 | 1263 |
| 106 | 71265724V1 | 731 | 1013 |
| 106 | 1915736H1 | 731 | 969 |
| 106 | 71265549V1 | 731 | 1202 |
| 106 | 71266530V1 | 732 | 1246 |
| 106 | 2681128F6 | 695 | 1180 |
| 106 | g2541182 | 2106 | 2424 |
| 106 | g3039868 | 2147 | 2225 |
| 106 | 3931985H1 | 896 | 1182 |
| 106 | 3934538H1 | 895 | 1200 |
| 106 | 3934758H1 | 895 | 1195 |
| 106 | 3934357H1 | 895 | 1200 |
| 106 | 3662984H1 | 1006 | 1254 |
| 106 | 70529227V1 | 1009 | 1601 |
| 106 | 71265619V1 | 1031 | 1689 |
| 106 | 5946829H1 | 1044 | 1325 |
| 106 | 71266345V1 | 1097 | 1749 |
| 106 | 71120487V1 | 1102 | 1594 |
| 106 | 71266010V1 | 1097 | 1765 |
| 106 | 5947885H1 | 1100 | 1363 |
| 106 | 3173959H1 | 1322 | 1589 |
| 106 | 70059533V1 | 1322 | 1585 |
| 106 | g1981676 | 1322 | 1654 |
| 106 | 70062034V1 | 1326 | 1794 |
| 107 | 5913661H1 | 1 | 283 |
| 107 | 5913661F8 | 1 | 569 |
| 107 | 5913661F6 | 1 | 575 |
| 107 | 5913661T6 | 213 | 821 |
| 108 | 6796436H1 | 1 | 435 |
| 108 | g5837313 | 111 | 559 |
| 109 | 2536867F6 | 918 | 1430 |
| 109 | 2536867H2 | 918 | 1187 |
| 109 | g1926046 | 932 | 1379 |
| 109 | g1925836 | 933 | 1201 |
| 109 | 3244923F6 | 993 | 1220 |
| 109 | 3244923H1 | 993 | 1213 |
| 109 | 2878889H1 | 1010 | 1304 |
| 109 | 2878889F6 | 1010 | 1349 |
| 109 | g858504 | 1080 | 1411 |
| 109 | 5567006H1 | 1081 | 1257 |
| 109 | 1896278H1 | 1106 | 1341 |
| 109 | g784668 | 1209 | 1286 |
| 109 | 3364252F6 | 1 | 432 |
| 109 | 3364252H1 | 1 | 226 |
| 109 | 096666H1 | 66 | 233 |
| 109 | 096675H1 | 67 | 240 |
| 109 | 7132087H1 | 255 | 624 |
| 109 | 4030547F8 | 461 | 1001 |
| 109 | 4030547H1 | 462 | 715 |
| 109 | 5077091H1 | 800 | 1072 |
| 110 | 2717953H1 | 1 | 259 |
| 110 | 2806157F6 | 27 | 606 |
| 110 | 2806157H1 | 26 | 323 |
| 110 | 2724233T6 | 367 | 954 |
| 111 | 166942F1 | 1 | 624 |
| 111 | g3755789 | 134 | 505 |
| 111 | g3109437 | 134 | 208 |
| 111 | g3037830 | 135 | 509 |
| 111 | g3180013 | 139 | 583 |
| 111 | g4270829 | 142 | 429 |
| 111 | g3594985 | 142 | 562 |
| 111 | 5282615T6 | 168 | 751 |
| 111 | g2942533 | 248 | 563 |
| 111 | g2953832 | 248 | 509 |
| 111 | g3040122 | 248 | 503 |
| 111 | g3051904 | 251 | 501 |
| 111 | g3804542 | 368 | 750 |
| 111 | 5282615F6 | 635 | 1106 |
| 111 | 5282615H1 | 884 | 1106 |
| 112 | g2563121 | 1 | 166 |
| 112 | 2792728F6 | 1 | 440 |
| 112 | 2792728T6 | 1 | 417 |
| 112 | g3040744 | 1 | 338 |
| 112 | g2714186 | 1 | 401 |
| 112 | 7157205H1 | 1 | 461 |
| 112 | g4371924 | 71 | 205 |
| 112 | 1394888T6 | 90 | 304 |
| 112 | 1624877H1 | 94 | 288 |
| 112 | 2792728H1 | 147 | 439 |
| 113 | g2943715 | 1 | 1450 |
| 113 | 6487571H1 | 657 | 1161 |
| 113 | 6487571F9 | 657 | 1207 |
| 113 | 70681361V1 | 692 | 1244 |
| 113 | 70681601V1 | 692 | 1178 |
| 113 | 1544823R6 | 692 | 1181 |
| 113 | 70681277V1 | 692 | 1164 |
| 113 | 1544823H1 | 692 | 898 |
| 113 | g4686743 | 879 | 1327 |
| 113 | 70680264V1 | 950 | 1079 |
| 113 | 6476403H1 | 998 | 1525 |
| 114 | 6272292H2 | 1 | 507 |
| 114 | 5910821T8 | 365 | 636 |
| 114 | 5910821T9 | 365 | 662 |
| 114 | 5910821F8 | 365 | 793 |
| 114 | 5910821H1 | 365 | 676 |
| 115 | 1551035H1 | 1625 | 1845 |
| 115 | 2716914H1 | 1625 | 1873 |
| 115 | 4876737H1 | 1631 | 1915 |
| 115 | 7091270H1 | 1631 | 1955 |
| 115 | 674945H1 | 1636 | 1903 |
| 115 | 670546H1 | 1636 | 1756 |
| 115 | 2119143H1 | 1637 | 1891 |
| 115 | 2815231H1 | 1643 | 1910 |
| 115 | g990246 | 1645 | 1912 |
| 115 | 957795H1 | 1653 | 1903 |
| 115 | 472488H1 | 1653 | 1882 |
| 115 | 472488R1 | 1654 | 2125 |
| 115 | 302216H1 | 1655 | 1877 |
| 115 | 1876833H1 | 1654 | 1913 |
| 115 | 2697195H1 | 1656 | 1898 |
| 115 | 5377444H1 | 1666 | 1918 |
| 115 | 2431879H1 | 1668 | 1914 |
| 115 | 777024H1 | 1669 | 1901 |
| 115 | 3236114H1 | 1675 | 1928 |
| 115 | 1641892H1 | 1677 | 1880 |
| 115 | 5569350H1 | 1678 | 1920 |
| 115 | 3857806H1 | 1686 | 1976 |
| 115 | g2751499 | 1694 | 2029 |
| 115 | g876527 | 1697 | 2020 |
| 115 | 4069649H1 | 1708 | 1834 |
| 115 | 4307481H1 | 1724 | 1900 |
| 115 | 031299H1 | 1750 | 1920 |
| 115 | 3623362H1 | 1779 | 2032 |
| 115 | g5036497 | 1858 | 2136 |
| 115 | 3624213H1 | 1872 | 2081 |
| 115 | g2411009 | 1907 | 2079 |
| 115 | 4721623H1 | 1918 | 2011 |
| 115 | 2839772H2 | 1922 | 2209 |
| 115 | 6056374H1 | 1933 | 2132 |
| 115 | 6056674H1 | 1933 | 2136 |
| 115 | 3802178H1 | 1933 | 2135 |
| 115 | 4371036H1 | 1940 | 2136 |
| 115 | 412662H1 | 1939 | 2136 |
| 115 | 1907478H1 | 1950 | 2136 |
| 115 | 5050475H1 | 1966 | 2136 |
| 115 | 6447704H1 | 1966 | 2106 |
| 115 | g3888474 | 1988 | 2321 |
| 115 | 5379172H1 | 1989 | 2238 |
| 115 | 5015647H1 | 1994 | 2136 |
| 115 | 3327673H1 | 1995 | 2251 |
| 115 | 3567634H1 | 2021 | 2137 |
| 115 | 1739210H1 | 2025 | 2215 |
| 115 | 880124H1 | 2032 | 2132 |
| 115 | 2354054H1 | 2037 | 2132 |
| 115 | 1235532H1 | 2060 | 2132 |
| 115 | 2350867H1 | 2062 | 2132 |
| 115 | g983285 | 2072 | 2421 |
| 115 | 4190021H1 | 2084 | 2132 |
| 115 | g2017399 | 2116 | 2329 |
| 115 | 6550613H1 | 2153 | 2494 |
| 115 | 5195955H1 | 2155 | 2420 |
| 115 | 3907635H1 | 2185 | 2464 |
| 115 | g3166884 | 2193 | 2356 |
| 115 | g994523 | 2232 | 2476 |
| 115 | g1099949 | 2244 | 2491 |
| 115 | g757333 | 2245 | 2513 |
| 115 | 4534796H1 | 2255 | 2463 |
| 115 | 1543657H1 | 2262 | 2468 |
| 115 | 4754806H1 | 2295 | 2496 |
| 115 | 1947635H1 | 2336 | 2483 |
| 115 | 3930538H1 | 2360 | 2496 |
| 115 | 2760689H1 | 2377 | 2496 |
| 115 | 5563236H1 | 2404 | 2496 |
| 115 | 4310883H1 | 2408 | 2496 |
| 115 | 2778679H1 | 2439 | 2496 |
| 115 | 725638H1 | 1 | 243 |
| 115 | 6733284H1 | 96 | 640 |
| 115 | 3096672H1 | 98 | 410 |
| 115 | 7034622H1 | 100 | 606 |
| 115 | g777461 | 120 | 197 |
| 115 | 5198834H1 | 146 | 385 |
| 115 | 2394482H2 | 157 | 372 |
| 115 | 4970513H1 | 161 | 431 |
| 115 | 4969579H1 | 160 | 361 |
| 115 | 377654H1 | 163 | 374 |
| 115 | 305879H1 | 187 | 444 |
| 115 | 307158H1 | 189 | 433 |
| 115 | 3319063H1 | 215 | 496 |
| 115 | 5504343H1 | 219 | 449 |
| 115 | 3513751H1 | 230 | 473 |
| 115 | 4775727H1 | 230 | 504 |
| 115 | 4696530H1 | 245 | 433 |
| 115 | 928643H1 | 289 | 554 |
| 115 | 4529248H1 | 370 | 618 |
| 115 | 3942806H1 | 418 | 694 |
| 115 | 7280921H1 | 466 | 677 |
| 115 | g2013891 | 480 | 698 |
| 115 | g2013455 | 480 | 709 |
| 115 | 5422141H1 | 481 | 726 |
| 115 | 3110608H1 | 525 | 776 |
| 115 | 5659913H1 | 620 | 896 |
| 115 | 5545664F8 | 647 | 982 |
| 115 | 5545664F6 | 647 | 1087 |
| 115 | 3163564H1 | 751 | 1011 |
| 115 | 761584H1 | 768 | 982 |
| 115 | 6887167J1 | 837 | 1454 |
| 115 | 1852303H1 | 1011 | 1084 |
| 115 | 6948478H1 | 1087 | 1504 |
| 115 | 4158605H1 | 1206 | 1469 |
| 115 | 5270074H1 | 1238 | 1440 |
| 115 | 2365846H1 | 1239 | 1469 |
| 115 | 2444605H1 | 1244 | 1464 |
| 115 | 3115706H1 | 1255 | 1482 |
| 115 | 6728257H1 | 1349 | 1938 |
| 115 | 5717548H1 | 1401 | 1922 |
| 115 | 5796003H1 | 1427 | 1849 |
| 115 | 779492H1 | 1436 | 1699 |
| 115 | 2279382H1 | 1436 | 1702 |
| 115 | 5370473H1 | 1439 | 1656 |
| 115 | 4152676H1 | 1450 | 1712 |
| 115 | 60123909B1 | 1458 | 2086 |
| 115 | 6960268H1 | 1466 | 1902 |
| 115 | 3449619H1 | 1461 | 1706 |
| 115 | 7039654H1 | 1461 | 1970 |
| 115 | 3890456H1 | 1461 | 1758 |
| 115 | 6966324H1 | 1466 | 2051 |
| 115 | 765511H1 | 1469 | 1812 |
| 115 | 4940482T9 | 1481 | 2031 |
| 115 | 6409578H1 | 1486 | 1978 |
| 115 | 6734637H1 | 1495 | 1912 |
| 115 | 2886241H1 | 1493 | 1744 |
| 115 | 1222871H1 | 1495 | 1739 |
| 115 | 4193226H1 | 1498 | 1707 |
| 115 | 7065251H1 | 1500 | 2097 |
| 115 | 2152140H1 | 1501 | 1772 |
| 115 | 3763167H1 | 1502 | 1559 |
| 115 | 3571390H1 | 1504 | 1790 |
| 115 | 942026H1 | 1509 | 1756 |
| 115 | 4533306T1 | 1513 | 2067 |
| 115 | 2124615H1 | 1517 | 1816 |
| 115 | 3684042H1 | 1522 | 1808 |
| 115 | 6715567H1 | 1523 | 2096 |
| 115 | 3322645H1 | 1523 | 1782 |
| 115 | g1873672 | 1524 | 2006 |
| 115 | 3590863H1 | 1530 | 1809 |
| 115 | 60123902B1 | 1538 | 2104 |
| 115 | 1002539H1 | 1538 | 1639 |
| 115 | 6077425H1 | 1541 | 1858 |
| 115 | 6513731H1 | 1548 | 2079 |
| 115 | 3785763H1 | 1548 | 1837 |
| 115 | 538349H1 | 1550 | 1775 |
| 115 | 1832140H1 | 1551 | 1753 |
| 115 | 1669989H1 | 1553 | 1767 |
| 115 | 450252H1 | 1553 | 1773 |
| 115 | 737082H1 | 1556 | 1778 |
| 115 | 7065802H1 | 1560 | 2096 |
| 115 | 6741001H1 | 1563 | 2068 |
| 115 | 835332H1 | 1566 | 1869 |
| 115 | 1599938T6 | 1569 | 2099 |
| 115 | 4226362H1 | 1573 | 1848 |
| 115 | 529930H1 | 1578 | 1721 |
| 115 | 4771124H1 | 1577 | 1846 |
| 115 | 4715169H1 | 1583 | 1859 |
| 115 | 4533768T1 | 1584 | 2101 |
| 115 | 4895425H1 | 1591 | 1861 |
| 115 | 4348930H1 | 1593 | 1852 |
| 115 | 4348733H1 | 1594 | 1854 |
| 115 | g2616416 | 1596 | 1833 |
| 115 | 5698825H1 | 1596 | 1847 |
| 115 | 2288814H1 | 1597 | 1844 |
| 115 | 5762293H1 | 1598 | 2136 |
| 115 | 3082229T6 | 1601 | 1987 |
| 115 | 3737781H1 | 1598 | 1897 |
| 115 | 883098H1 | 1600 | 1835 |
| 115 | 5336847H1 | 1601 | 1837 |
| 115 | 2741220H1 | 1601 | 1860 |
| 115 | 880546H1 | 1600 | 1841 |
| 115 | 6398288H1 | 1601 | 1744 |
| 115 | 3252954H1 | 1608 | 1863 |
| 115 | 3779658H1 | 1618 | 1921 |
| 116 | g1891130 | 669 | 957 |
| 116 | 7333578H1 | 1 | 523 |
| 116 | 6545439H1 | 141 | 676 |
| 116 | g3805536 | 534 | 966 |
| 116 | g3322110 | 534 | 772 |
| 116 | 5610773H1 | 537 | 788 |
| 117 | 6929774H1 | 1 | 513 |
| 117 | 6052078J1 | 72 | 520 |
| 117 | 6052078H1 | 72 | 520 |
| 117 | 4970577H1 | 120 | 381 |
| 117 | 4970577F6 | 120 | 483 |
| 117 | 6292129H1 | 423 | 637 |
| 117 | 6294687H1 | 423 | 647 |
| 117 | 2807905H1 | 555 | 863 |
| 117 | g2540618 | 597 | 871 |
| 117 | 4401727H1 | 650 | 916 |
| 117 | 5729803H1 | 731 | 1236 |
| 117 | g1301257 | 787 | 1245 |
| 117 | 026879H1 | 838 | 1092 |
| 117 | g1303063 | 897 | 1111 |
| 117 | 522135H1 | 1025 | 1160 |
| 117 | 522228H1 | 1025 | 1269 |
| 118 | 587588R6 | 1 | 336 |
| 118 | 587588T6 | 1 | 512 |
| 118 | g1069975 | 229 | 539 |
| 119 | g2809760 | 1 | 443 |
| 119 | g2934256 | 68 | 387 |
| 119 | 2785236H2 | 220 | 481 |
| 119 | 3437984H1 | 274 | 530 |
| 119 | 2544176H1 | 332 | 520 |
| 120 | 2807456F6 | 1 | 508 |
| 120 | 2807456H1 | 1 | 249 |
| 120 | 2807456T6 | 122 | 671 |
| 121 | g3595066 | 1 | 357 |
| 121 | 4665764H1 | 1 | 257 |
| 122 | 70151773V1 | 587 | 917 |
| 122 | 60203477U1 | 266 | 822 |
| 122 | 522228H1 | 955 | 1199 |
| 122 | 522135H1 | 955 | 1090 |
| 122 | 026879H1 | 768 | 1022 |
| 122 | 60203621U1 | 1 | 548 |
| 122 | 60203622U1 | 118 | 507 |
| 122 | 4401727H1 | 579 | 846 |
| 122 | g2540618 | 526 | 801 |
| 122 | 2807905H1 | 484 | 793 |
| 122 | 70152547V1 | 797 | 1219 |
| 122 | 3812508H1 | 140 | 438 |
| 122 | g1265991 | 198 | 338 |
| 122 | 3860472H1 | 256 | 546 |
| 122 | 3520754H1 | 334 | 621 |
| 122 | 70152228V1 | 391 | 1018 |
| 122 | 4350225H1 | 364 | 638 |
| 122 | 70155823V1 | 419 | 986 |
| 122 | g3919706 | 1 | 424 |
| 122 | 2512390F6 | 1 | 316 |
| 122 | g1792877 | 1 | 365 |
| 122 | g4187765 | 4 | 446 |
| 122 | g2905531 | 4 | 102 |
| 122 | 70156040V1 | 960 | 1356 |
| 122 | 70151954V1 | 828 | 1353 |
| 122 | 2512390H1 | 14 | 316 |
| 122 | 60202389B1 | 858 | 1335 |
| 122 | 60202388B1 | 870 | 1329 |
| 122 | 60202388B2 | 924 | 1329 |
| 122 | 999391H1 | 37 | 270 |
| 122 | 2512390T6 | 38 | 315 |
| 122 | 4970577T6 | 45 | 618 |
| 122 | 60110854B2 | 1164 | 1287 |
| 122 | g2884782 | 1 | 452 |
| 122 | g2220423 | 1 | 398 |
| 122 | g1267721 | 1 | 282 |
| 122 | g3918260 | 1 | 411 |
| 123 | 2807456F6 | 194 | 701 |
| 123 | 2807456H1 | 1 | 249 |
| 123 | 2807456T6 | 31 | 580 |
| 123 | 270567H1 | 78 | 161 |
| 123 | 269931H1 | 374 | 499 |
| 123 | 269626H1 | 1824 | 2053 |
| 123 | 269080H1 | 128 | 352 |
| 123 | 270403H1 | 85 | 349 |
| 123 | 270910R1 | 1824 | 2022 |
| 124 | 587588R6 | 220 | 555 |
| 124 | 587588T6 | 44 | 555 |
| 124 | 587588H1 | 1 | 165 |
| 125 | 3321035F6 | 317 | 786 |
| 125 | 3321035H1 | 330 | 595 |
| 125 | g1319620 | 414 | 927 |
| 125 | g2741801 | 414 | 556 |
| 125 | g2841030 | 1354 | 1422 |
| 125 | g2933104 | 421 | 906 |
| 126 | 5259815H1 | 1 | 206 |
| 126 | 3568526H1 | 71 | 366 |
| 126 | 1289824F6 | 181 | 734 |
| 126 | g928730 | 693 | 889 |
| 126 | 764159H1 | 693 | 849 |
| 126 | 6620992H1 | 718 | 1297 |
| 126 | 839936R1 | 825 | 1369 |
| 126 | 1289824H1 | 181 | 349 |
| 126 | 839936H1 | 825 | 1066 |
| 126 | 3869224H1 | 996 | 1286 |
| 126 | 1685280F6 | 522 | 955 |
| 126 | 3223525H1 | 1137 | 1457 |
| 126 | 3843717H1 | 1 | 293 |
| 126 | g1395923 | 1198 | 1531 |
| 126 | 1685280H1 | 522 | 754 |
| 126 | 5028090H1 | 1333 | 1598 |
| 126 | 4216695H1 | 1404 | 1656 |
| 126 | 1289824T6 | 249 | 852 |
| 126 | g2540596 | 600 | 897 |
| 126 | 5724304H1 | 664 | 1233 |
| 126 | 1947742T6 | 688 | 858 |
| 126 | g1225270 | 688 | 889 |
| 126 | 3438058F6 | 269 | 562 |
| 126 | 3438058H1 | 318 | 562 |
| 126 | 3438058T6 | 45 | 516 |
| 126 | g3804916 | 6 | 436 |
| 126 | g3254781 | 1 | 379 |
| 127 | 3504571H1 | 910 | 1216 |
| 127 | g2055741 | 1038 | 1358 |
| 127 | g1270278 | 1025 | 1374 |
| 127 | 2733544H1 | 1137 | 1405 |
| 127 | g1162686 | 1144 | 1490 |
| 127 | g1109059 | 1197 | 1484 |
| 127 | g1774715 | 1212 | 1519 |
| 127 | g3897241 | 1316 | 1718 |
| 127 | 5854467H1 | 1401 | 1557 |
| 127 | g1898243 | 1492 | 1691 |
| 128 | g2358498 | 616 | 997 |
| 128 | 183176H1 | 747 | 971 |
| 128 | 183176R6 | 507 | 971 |
| 128 | 183176R1 | 359 | 971 |
| 128 | 2733388H1 | 659 | 888 |
| 128 | 5616358H1 | 602 | 878 |
| 128 | g2824012 | 433 | 792 |
| 128 | g4762579 | 167 | 600 |
| 128 | 7104793H1 | 1 | 520 |
| 128 | 4004284H1 | 207 | 474 |
| 129 | 3928775H1 | 1 | 192 |
| 129 | 2562126T6 | 40 | 182 |
| 130 | g4902006 | 709 | 895 |
| 130 | 2562126T6 | 708 | 852 |
| 130 | 839936R1 | 828 | 1385 |
| 130 | 839936H1 | 828 | 1073 |
| 130 | 1685280F6 | 1040 | 1477 |
| 130 | 3869224H1 | 1001 | 1301 |
| 130 | 4032140H1 | 1443 | 1700 |
| 130 | 1597096H1 | 1442 | 1628 |
| 130 | 3438058T6 | 1483 | 1957 |
| 130 | 4032240T9 | 1491 | 1900 |
| 130 | g3804916 | 1564 | 1997 |
| 130 | g3432508 | 1574 | 2002 |
| 130 | g3254781 | 1621 | 2002 |
| 130 | 1947742T6 | 689 | 861 |
| 130 | g928730 | 693 | 892 |
| 130 | 3223525H1 | 1152 | 1474 |
| 130 | 5259815H1 | 1 | 206 |
| 130 | 3568526H1 | 71 | 366 |
| 130 | 1289824F6 | 181 | 737 |
| 130 | 1289824H1 | 181 | 349 |
| 130 | g2540596 | 600 | 900 |
| 130 | 4216695H1 | 1421 | 1676 |
| 130 | 3438058F6 | 1437 | 1733 |
| 130 | 3438058H1 | 1437 | 1682 |
| 130 | 1597096F6 | 1442 | 2036 |
| 130 | 1685280H1 | 1243 | 1477 |
| 130 | 5028090H1 | 1348 | 1616 |
| 130 | 7213258H1 | 1225 | 1803 |
| 130 | g1395923 | 1213 | 1549 |
| 130 | 3928775H1 | 696 | 891 |
| 130 | 1289824T6 | 249 | 855 |
| 130 | 3843717H1 | 1153 | 1448 |
| 130 | 764159H1 | 693 | 852 |
| 130 | 5724304H1 | 664 | 1213 |
| 130 | 6040888H1 | 665 | 891 |
| 130 | g1225270 | 689 | 892 |
| 130 | 7153412H1 | 656 | 1189 |
| 130 | 3640283T9 | 1701 | 1932 |
| 130 | 3640283T8 | 1701 | 1908 |
| 130 | g3538751 | 1690 | 2005 |
| 130 | 3640283F8 | 1701 | 1949 |
| 130 | 6620992H1 | 717 | 1277 |
| 131 | 3404480H1 | 1921 | 2103 |
| 131 | 5665320H1 | 2177 | 2358 |
| 131 | 872922H1 | 7624 | 7881 |
| 131 | 6881955J1 | 2681 | 3266 |
| 131 | 2825680F6 | 7992 | 8265 |
| 131 | g5036098 | 8059 | 8265 |
| 131 | 4027974T6 | 6903 | 7418 |
| 131 | 5717756H1 | 6914 | 7382 |
| 131 | 2717848T6 | 6942 | 7421 |
| 131 | 4722802H1 | 6965 | 7069 |
| 131 | g3594812 | 7015 | 7468 |
| 131 | 6403421H1 | 7053 | 7317 |
| 131 | g3163456 | 7067 | 7469 |
| 131 | 2649733F6 | 7123 | 7465 |
| 131 | 2649733H1 | 7123 | 7369 |
| 131 | 7003170H1 | 7124 | 7465 |
| 131 | g683322 | 7127 | 7465 |
| 131 | 2649733T6 | 7128 | 7424 |
| 131 | 2484677H1 | 7142 | 7369 |
| 131 | g6075627 | 7147 | 7469 |
| 131 | g3048962 | 7149 | 7468 |
| 131 | 212391H1 | 7200 | 7437 |
| 131 | g6506945 | 7080 | 7465 |
| 131 | g6073337 | 7082 | 7469 |
| 131 | g2630574 | 7111 | 7470 |
| 131 | 5207126H2 | 2813 | 2981 |
| 131 | 2825680H1 | 7994 | 8265 |
| 131 | g560960 | 8006 | 8268 |
| 131 | g796025 | 8011 | 8277 |
| 131 | 1415181H1 | 8034 | 8265 |
| 131 | 3336518H1 | 3434 | 3669 |
| 131 | 4723427H1 | 3458 | 3606 |
| 131 | 70390598D1 | 3509 | 4085 |
| 131 | 264846H1 | 2524 | 2856 |
| 131 | 6357277H1 | 2531 | 2839 |
| 131 | 5544294H1 | 2708 | 2828 |
| 131 | 2101112T6 | 7755 | 8220 |
| 131 | 7162079H1 | 218 | 671 |
| 131 | g2599501 | 1 | 4447 |
| 131 | 6044517J1 | 7709 | 8237 |
| 131 | 810518H1 | 8140 | 8262 |
| 131 | 2101112H1 | 7763 | 8008 |
| 131 | 2101112R6 | 7764 | 8137 |
| 131 | 6559424H1 | 7774 | 8284 |
| 131 | g2140984 | 7774 | 8165 |
| 131 | 3781662H1 | 7815 | 8126 |
| 131 | 744157H1 | 7818 | 8046 |
| 131 | 4774224T9 | 7821 | 8181 |
| 131 | g2324704 | 7831 | 8266 |
| 131 | g3796940 | 7834 | 8265 |
| 131 | g5839127 | 7843 | 8265 |
| 131 | g3932489 | 7870 | 8265 |
| 131 | g683058 | 7964 | 8268 |
| 131 | g1225252 | 7984 | 8268 |
| 131 | 2825680T6 | 7985 | 8226 |
| 131 | 3278368H1 | 7719 | 7959 |
| 131 | 4726587H1 | 7619 | 7844 |
| 131 | 2108075H1 | 7405 | 7654 |
| 131 | g1241115 | 7445 | 7723 |
| 131 | 4632120H1 | 7488 | 7765 |
| 131 | 4632247H1 | 7488 | 7765 |
| 131 | 7154510H1 | 7499 | 7643 |
| 131 | 6162751H1 | 7497 | 8049 |
| 131 | 1593082F6 | 3583 | 4007 |
| 131 | 1593043H1 | 3583 | 3803 |
| 131 | 1593082H1 | 3583 | 3803 |
| 131 | 7236349H1 | 3664 | 4161 |
| 131 | 4004354H1 | 3665 | 3798 |
| 131 | 439020H1 | 3680 | 3902 |
| 131 | 3480603H1 | 3698 | 3865 |
| 131 | g1678362 | 3734 | 3890 |
| 131 | g4691014 | 3746 | 4204 |
| 131 | g6132554 | 3779 | 4207 |
| 131 | g3756265 | 3780 | 4206 |
| 131 | g1199039 | 3835 | 4151 |
| 131 | g819518 | 3859 | 4212 |
| 131 | 2155889F6 | 3867 | 4265 |
| 131 | 2155889H1 | 3867 | 4106 |
| 131 | 3513325H1 | 3880 | 4124 |
| 131 | 70391721D1 | 3896 | 4321 |
| 131 | 2155889T6 | 3964 | 4405 |
| 131 | g5675561 | 3974 | 4452 |
| 131 | 6618788H1 | 3991 | 4472 |
| 131 | g3144228 | 4048 | 4452 |
| 131 | g2751511 | 4080 | 4441 |
| 131 | 1863153F6 | 4273 | 4666 |
| 131 | 1863161F6 | 4273 | 4526 |
| 131 | 1863153H1 | 4273 | 4520 |
| 131 | 385245H1 | 4275 | 4498 |
| 131 | g4970402 | 4364 | 4819 |
| 131 | 5857654H1 | 4368 | 4636 |
| 131 | g1624652 | 4395 | 4466 |
| 131 | g1023422 | 4479 | 4773 |
| 131 | g1023318 | 4511 | 4801 |
| 131 | 3341807F6 | 4527 | 4888 |
| 131 | 3341807H1 | 4527 | 4766 |
| 131 | 4027974F6 | 4592 | 4881 |
| 131 | 4027926H1 | 4592 | 4822 |
| 131 | 6024929H1 | 4601 | 4923 |
| 131 | 2203255H1 | 4755 | 5006 |
| 131 | 4184071H1 | 4839 | 5084 |
| 131 | 3322055F6 | 4994 | 5518 |
| 131 | 3322055H1 | 4994 | 5271 |
| 131 | 1863161T6 | 5057 | 5459 |
| 131 | 811828H1 | 5105 | 5352 |
| 131 | 789137H1 | 5167 | 5226 |
| 131 | g3077295 | 5179 | 5635 |
| 131 | 3242918H1 | 5346 | 5610 |
| 131 | 4578433H1 | 5545 | 5787 |
| 131 | 5694130H1 | 5702 | 5886 |
| 131 | 4255728H1 | 5783 | 6052 |
| 131 | 5673677H1 | 5815 | 5974 |
| 131 | g1880292 | 5855 | 6068 |
| 131 | 5768386H1 | 5903 | 6448 |
| 131 | g1442274 | 5974 | 6178 |
| 131 | g1678263 | 6029 | 6205 |
| 131 | 3607889H1 | 6044 | 6335 |
| 131 | g709099 | 6063 | 6392 |
| 131 | g769480 | 6063 | 6274 |
| 131 | g692094 | 6065 | 6419 |
| 131 | 5036970H1 | 7696 | 7961 |
| 131 | g2212423 | 7200 | 7465 |
| 131 | 3282024T6 | 7255 | 7409 |
| 131 | 3323350H1 | 7271 | 7524 |
| 131 | g2768029 | 7301 | 7465 |
| 131 | 3322677H1 | 7313 | 7591 |
| 131 | g1515911 | 7317 | 7464 |
| 131 | 3865622H1 | 7330 | 7526 |
| 131 | g317850 | 7332 | 7592 |
| 131 | g3174898 | 7357 | 7469 |
| 131 | 4253321H1 | 7391 | 7470 |
| 131 | 4244366H1 | 7390 | 7465 |
| 131 | 3334656H1 | 7394 | 7606 |
| 131 | 6355568H1 | 3040 | 3236 |
| 131 | g1881143 | 3040 | 3347 |
| 131 | 1372008H1 | 7499 | 7667 |
| 131 | 2292865H1 | 7499 | 7721 |
| 131 | g915845 | 7561 | 7784 |
| 131 | 2289132H1 | 7571 | 7802 |
| 131 | 5832896H1 | 7593 | 7874 |
| 131 | 4774272H1 | 7612 | 7881 |
| 131 | 1393295H1 | 7499 | 7692 |
| 131 | 1772773H1 | 7522 | 7784 |
| 131 | 6269862H1 | 6136 | 6658 |
| 131 | g1975380 | 6238 | 6568 |
| 131 | 3389337H1 | 6336 | 6619 |
| 131 | 6706684H1 | 6370 | 6913 |
| 131 | 3282024F6 | 6416 | 6946 |
| 131 | 3282024H1 | 6416 | 6662 |
| 131 | 3854583H1 | 6428 | 6705 |
| 131 | 2509302H1 | 6442 | 6670 |
| 131 | 7225908H1 | 6547 | 7110 |
| 131 | 3147875H1 | 6581 | 6852 |
| 131 | 3797563H1 | 6583 | 6873 |
| 131 | g2398342 | 1058 | 1351 |
| 131 | 6881955H1 | 1921 | 2185 |
| 131 | 2717848F6 | 6584 | 7049 |
| 131 | 2717848H1 | 6584 | 6832 |
| 131 | 4058694H1 | 6629 | 6895 |
| 131 | 025240H1 | 6665 | 6932 |
| 131 | 4270965H1 | 6782 | 6955 |
| 131 | 3341807T6 | 6814 | 7417 |
| 131 | 3322055T6 | 6820 | 7418 |
| 131 | 4027974T9 | 6822 | 7361 |
| 131 | g691854 | 6874 | 7235 |
| 131 | 4029613H1 | 6873 | 7102 |
| 131 | g708808 | 6874 | 7171 |
| 131 | g565754 | 6874 | 7098 |
| 131 | 124772H1 | 6888 | 7030 |
| 132 | 1630826T6 | 1136 | 1410 |
| 132 | g5813217 | 1172 | 1255 |
| 132 | 1631555T6 | 1194 | 1410 |
| 132 | 3878121H1 | 1210 | 1271 |
| 132 | 1986029H1 | 1210 | 1281 |
| 132 | 2956806H1 | 1210 | 1284 |
| 132 | 1372584H1 | 1214 | 1417 |
| 132 | 854216H1 | 1 | 247 |
| 132 | 854312R6 | 1 | 445 |
| 132 | 854312H1 | 1 | 151 |
| 132 | 2465049H1 | 150 | 358 |
| 132 | 2465049F6 | 150 | 697 |
| 132 | 2271395H1 | 192 | 455 |
| 132 | 2271395R6 | 192 | 704 |
| 132 | g2184123 | 196 | 582 |
| 132 | g1692736 | 348 | 740 |
| 132 | 2465049T6 | 519 | 1047 |
| 132 | 1601994H1 | 535 | 677 |
| 132 | 5274102T6 | 569 | 1060 |
| 132 | g3413112 | 652 | 1088 |
| 132 | g1692707 | 687 | 1094 |
| 132 | g3428202 | 689 | 1088 |
| 132 | g1686359 | 836 | 967 |
| 132 | g2714128 | 860 | 1089 |
| 132 | g3843958 | 950 | 1089 |
| 132 | g4394372 | 950 | 1088 |
| 132 | g3844127 | 950 | 1089 |
| 132 | g661412 | 957 | 1252 |
| 133 | g5438299 | 717 | 1143 |
| 133 | g5109774 | 443 | 863 |
| 133 | g5526440 | 420 | 841 |
| 133 | g4599202 | 303 | 725 |
| 133 | 6306770H1 | 1 | 450 |
| 134 | 4186114H1 | 683 | 1024 |
| 134 | 4186114F6 | 683 | 1091 |
| 134 | 4186114T6 | 921 | 1587 |
| 134 | 4165023H1 | 674 | 955 |
| 135 | 2268189H1 | 1 | 231 |
| 135 | 2268189R6 | 1 | 379 |
| 135 | 1470335H1 | 37 | 230 |
| 135 | g2505442 | 142 | 353 |
| 135 | g2505398 | 157 | 521 |
| 135 | g2458763 | 157 | 579 |
| 135 | 1445774H1 | 262 | 507 |
| 135 | 2268189T6 | 334 | 885 |
| 135 | 368103H1 | 520 | 763 |
| 135 | g2328398 | 608 | 929 |
| 135 | 2322571H1 | 690 | 923 |
| 136 | 6114201H1 | 1 | 292 |
| 136 | 3287273H1 | 260 | 505 |
| 136 | g779441 | 375 | 522 |
| 136 | g879517 | 78 | 440 |
| 136 | g870148 | 135 | 450 |
| 136 | g883117 | 77 | 465 |
| 136 | 2120815H1 | 450 | 565 |
| 136 | 1631555H1 | 450 | 565 |
| 136 | 1631555F6 | 450 | 565 |
| 136 | g705961 | 450 | 565 |
| 136 | 1547031H1 | 452 | 565 |
| 136 | 4796579H1 | 455 | 563 |
| 136 | 5081193H1 | 457 | 508 |
| 136 | 1630826F6 | 450 | 565 |
| 136 | 1630826H1 | 398 | 546 |
| 136 | g2023471 | 491 | 696 |
| 137 | 6864812H1 | 1 | 502 |
| 137 | 292419H1 | 194 | 469 |
| 137 | 292419R6 | 196 | 486 |
| 137 | 3960046H2 | 333 | 473 |
| 137 | 3960046F8 | 333 | 926 |
| 137 | g4114677 | 609 | 1055 |
| 137 | g3674688 | 744 | 1053 |
| 137 | 2705604T6 | 744 | 1011 |
| 137 | g3429159 | 744 | 1052 |
| 137 | 1871586H1 | 744 | 869 |
| 137 | 1998855H1 | 744 | 926 |
| 137 | 2135293H1 | 763 | 1036 |
| 137 | 2135293F6 | 763 | 1227 |
| 137 | 2100630H1 | 865 | 1055 |
| 137 | 292419T6 | 874 | 1001 |
| 137 | 3960046T8 | 887 | 1009 |
| 138 | 6100950H1 | 1 | 213 |
| 138 | 6302544H1 | 151 | 468 |
| 138 | 6144369H1 | 166 | 755 |
| 138 | 6144369F8 | 166 | 749 |
| 138 | 6099148H1 | 208 | 488 |
| 138 | 6281896H1 | 383 | 528 |
| 138 | 6111359H1 | 570 | 864 |
| 138 | 6028709H1 | 650 | 932 |
| 138 | 6144369T8 | 846 | 1259 |
| 139 | 5056523H1 | 2466 | 2604 |
| 139 | 2271032H1 | 893 | 1152 |
| 139 | 4243388H1 | 919 | 1251 |
| 139 | 4552488H1 | 958 | 1120 |
| 139 | g1953334 | 885 | 1086 |
| 139 | g1953371 | 885 | 986 |
| 139 | g713204 | 1029 | 1191 |
| 139 | g1967839 | 1091 | 1429 |
| 139 | 3737077H1 | 1295 | 1453 |
| 139 | 2271032R6 | 893 | 1370 |
| 139 | 6326476H1 | 1313 | 1610 |
| 139 | 1845337T6 | 2212 | 2566 |
| 139 | 1845337R6 | 2212 | 2562 |
| 139 | 1845337H1 | 2212 | 2433 |
| 139 | g4288591 | 2215 | 2599 |
| 139 | g5659132 | 2219 | 2551 |
| 139 | 913114H1 | 2228 | 2509 |
| 139 | g1960980 | 2253 | 2604 |
| 139 | g5887689 | 2244 | 2601 |
| 139 | 911966H1 | 2249 | 2503 |
| 139 | g5838009 | 2250 | 2611 |
| 139 | g5913083 | 2251 | 2604 |
| 139 | g3741346 | 2254 | 2611 |
| 139 | g3785022 | 2297 | 2602 |
| 139 | g2463906 | 2312 | 2607 |
| 139 | g4312734 | 2347 | 2599 |
| 139 | g2100983 | 2358 | 2591 |
| 139 | 4519262H1 | 2360 | 2599 |
| 139 | 1272843T6 | 2368 | 2562 |
| 139 | 6104909H1 | 2413 | 2604 |
| 139 | 4180584H1 | 1872 | 2122 |
| 139 | g1968950 | 1886 | 2368 |
| 139 | 5038396H1 | 1888 | 2146 |
| 139 | 6576957H1 | 1907 | 2455 |
| 139 | 3254138H1 | 1908 | 2115 |
| 139 | 5946104H1 | 1910 | 2145 |
| 139 | 2700155F6 | 1922 | 2433 |
| 139 | 2700155H1 | 1922 | 2121 |
| 139 | 2061567T6 | 1951 | 2554 |
| 139 | 3365965H1 | 1983 | 2108 |
| 139 | g5591869 | 2006 | 2220 |
| 139 | 1749882T6 | 2039 | 2571 |
| 139 | 1752020H1 | 2049 | 2258 |
| 139 | 2700155T6 | 2063 | 2563 |
| 139 | 1889107T6 | 2099 | 2562 |
| 139 | 3236592H2 | 2125 | 2340 |
| 139 | 5291302H1 | 2152 | 2398 |
| 139 | g5038163 | 2168 | 2608 |
| 139 | g2355286 | 2200 | 2589 |
| 139 | g3146568 | 2200 | 2604 |
| 139 | 5307668H1 | 1567 | 1691 |
| 139 | g1968949 | 1345 | 1812 |
| 139 | 5840503H2 | 1578 | 1835 |
| 139 | g2229641 | 1360 | 1792 |
| 139 | 6725031H1 | 1675 | 2299 |
| 139 | 476160H1 | 1389 | 1655 |
| 139 | 2061567R6 | 1698 | 2177 |
| 139 | 2061567H1 | 1698 | 1970 |
| 139 | 6158833H1 | 1433 | 1523 |
| 139 | 794690H1 | 1496 | 1698 |
| 139 | 6576416H1 | 1513 | 1850 |
| 139 | 1889107H1 | 1542 | 1812 |
| 139 | 2250985H1 | 1734 | 1964 |
| 139 | 1889107F6 | 1542 | 1892 |
| 139 | 4399135H1 | 1734 | 1991 |
| 139 | 4399331H1 | 1734 | 2000 |
| 139 | 1501428H1 | 1737 | 1930 |
| 139 | 6823952J1 | 1549 | 2162 |
| 139 | 6018675H1 | 1812 | 2378 |
| 139 | 4516041H1 | 1817 | 2066 |
| 139 | 1272843H1 | 1 | 245 |
| 139 | 1272843F6 | 1 | 593 |
| 139 | 1272843F1 | 1 | 331 |
| 139 | 1274319H1 | 21 | 218 |
| 139 | 2598183H1 | 24 | 263 |
| 139 | 3256051H1 | 25 | 268 |
| 139 | 6826541J1 | 33 | 663 |
| 139 | 6823903H1 | 34 | 188 |
| 139 | 6820526H1 | 422 | 747 |
| 139 | 6820526J1 | 422 | 747 |
| 139 | 6826541H1 | 672 | 1240 |
| 139 | 3857549H1 | 797 | 1106 |
| 139 | 1749882F6 | 811 | 1171 |
| 139 | 1749882H1 | 811 | 1085 |
| 139 | 6829715H1 | 860 | 1357 |
| 140 | 1272843F1 | 1 | 331 |
| 140 | 1272843F6 | 1 | 587 |
| 140 | 1272843H1 | 1 | 245 |
| 140 | 1274319H1 | 21 | 218 |
| 140 | 2598183H1 | 24 | 263 |
| 140 | 3256051H1 | 25 | 268 |
| 140 | 3857549H1 | 306 | 615 |
| 140 | 1749882F6 | 320 | 680 |
| 140 | 1749882H1 | 320 | 594 |
| 140 | g1953334 | 394 | 595 |
| 140 | g1953371 | 394 | 495 |
| 140 | 2271032R6 | 402 | 880 |
| 140 | 2271032H1 | 402 | 661 |
| 140 | 4243388H1 | 428 | 761 |
| 140 | 4552488H1 | 467 | 629 |
| 140 | g713204 | 538 | 701 |
| 140 | g1967839 | 600 | 939 |
| 140 | 3737077H1 | 805 | 963 |
| 140 | 6326476H1 | 823 | 1120 |
| 140 | g1968949 | 855 | 1322 |
| 140 | g2229641 | 870 | 1302 |
| 140 | 476160H1 | 899 | 1165 |
| 140 | 6158833H1 | 943 | 1033 |
| 140 | 794690H1 | 1006 | 1208 |
| 140 | 1889107F6 | 1052 | 1402 |
| 140 | 1889107H1 | 1052 | 1322 |
| 140 | 5840503H2 | 1088 | 1345 |
| 140 | 2061567H1 | 1208 | 1480 |
| 140 | 2061567R6 | 1208 | 1687 |
| 140 | 4399331H1 | 1244 | 1510 |
| 140 | 4399135H1 | 1244 | 1501 |
| 140 | 2250985H1 | 1244 | 1474 |
| 140 | 1501428H1 | 1247 | 1440 |
| 140 | 4516041H1 | 1327 | 1576 |
| 140 | 4180584H1 | 1382 | 1632 |
| 140 | g1968950 | 1396 | 1878 |
| 140 | 5038396H1 | 1398 | 1656 |
| 140 | 3254138H1 | 1418 | 1625 |
| 140 | 5946104H1 | 1420 | 1655 |
| 140 | 2700155F6 | 1432 | 1943 |
| 140 | 2700155H1 | 1432 | 1631 |
| 140 | 2061567T6 | 1461 | 2064 |
| 140 | 3365965H1 | 1493 | 1618 |
| 140 | 1749882T6 | 1549 | 2081 |
| 140 | 70366789D1 | 1569 | 1883 |
| 140 | 1752020H1 | 1559 | 1768 |
| 140 | 2700155T6 | 1573 | 2073 |
| 140 | 1889107T6 | 1609 | 2072 |
| 140 | 3236592H2 | 1635 | 1850 |
| 140 | 5291302H1 | 1662 | 1908 |
| 140 | g2355286 | 1710 | 2099 |
| 140 | g3146568 | 1710 | 2114 |
| 140 | 1845337R6 | 1722 | 2072 |
| 140 | 1845337T6 | 1722 | 2076 |
| 140 | 1845337H1 | 1722 | 1943 |
| 140 | g4288591 | 1725 | 2109 |
| 140 | 913114H1 | 1738 | 2019 |
| 140 | g1960980 | 1763 | 2114 |
| 140 | 911966H1 | 1759 | 2013 |
| 140 | g3741346 | 1764 | 2121 |
| 140 | g3785022 | 1807 | 2112 |
| 140 | g2463906 | 1822 | 2117 |
| 140 | g4312734 | 1857 | 2109 |
| 140 | g2100983 | 1868 | 2101 |
| 140 | 4519262H1 | 1870 | 2109 |
| 140 | 1272843T6 | 1878 | 2072 |
| 140 | 6104909H1 | 1923 | 2114 |
| 140 | 5056523H1 | 1976 | 2114 |
| 141 | 2211487F6 | 1 | 511 |
| 141 | 2211487T6 | 195 | 778 |
| 141 | 2412148H1 | 263 | 497 |
| 141 | 2564905H1 | 540 | 809 |
| 141 | 125647H1 | 559 | 768 |
| 141 | 2242295T6 | 625 | 773 |
| 141 | 2211487H1 | 1 | 241 |
| 142 | 3404890H1 | 1 | 218 |
| 142 | 3387263H1 | 44 | 343 |
| 142 | g1225131 | 45 | 275 |
| 142 | 2745513H1 | 52 | 296 |
| 143 | 3330364H1 | 1 | 264 |
| 143 | 2532555H1 | 1 | 245 |
| 143 | 2532555F6 | 1 | 202 |
| 143 | 3452732H1 | 7 | 223 |
| 143 | 6206478H1 | 8 | 551 |
| 143 | 2240790H1 | 7 | 246 |
| 143 | 2240790F6 | 7 | 455 |
| 143 | 4052530H1 | 9 | 302 |
| 143 | 2211943H1 | 38 | 294 |
| 143 | 2207141H1 | 1 | 161 |
| 143 | 6338721H1 | 60 | 530 |
| 143 | 3722062H1 | 63 | 355 |
| 143 | 3564688H1 | 78 | 370 |
| 143 | g1390898 | 122 | 415 |
| 143 | 5154455F6 | 261 | 738 |
| 143 | 5154455H1 | 489 | 738 |
| 143 | 5155056H1 | 492 | 738 |
| 143 | 5440206H1 | 376 | 645 |
| 143 | 6206972H1 | 638 | 1158 |
| 143 | 2240790T6 | 39 | 495 |
| 143 | g2155919 | 45 | 468 |
| 143 | 3219860T6 | 39 | 451 |
| 143 | 3219860H1 | 135 | 451 |
| 143 | 3219860R6 | 1 | 451 |
| 143 | 3221716H1 | 149 | 451 |
| 143 | 2412827H1 | 233 | 450 |
| 143 | g3932128 | 5 | 420 |
| 143 | g2155881 | 1 | 335 |
| 143 | g2775288 | 1 | 329 |
| 143 | g3277838 | 1 | 325 |
| 143 | g1390787 | 5 | 313 |
| 143 | 2532555T6 | 50 | 283 |
| 143 | g1422648 | 1 | 217 |
| 143 | g1783871 | 2 | 194 |
| 144 | 60210582U1 | 1 | 374 |
| 144 | g857093 | 1 | 226 |
| 144 | 60124509B1 | 198 | 336 |
| 145 | g2324899 | 1 | 329 |
| 145 | g4525985 | 12 | 329 |
| 145 | 3516332H1 | 36 | 278 |
| 145 | 3012696F6 | 162 | 329 |
| 145 | 3012696H1 | 162 | 337 |
| 145 | 3012696T6 | 169 | 288 |
| 145 | 561748H1 | 231 | 329 |
| 146 | 6623203J1 | 1 | 573 |
| 146 | 3538176T6 | 590 | 927 |
| 147 | 5643301H1 | 1 | 266 |
| 147 | 5643301F6 | 1 | 412 |
| 147 | 7007819H1 | 12 | 557 |
| 147 | 7008530H1 | 19 | 463 |
| 147 | 7161666H1 | 34 | 435 |
| 147 | 7017571H1 | 42 | 211 |
| 147 | 3277305H1 | 128 | 393 |
| 147 | 3565182H1 | 492 | 782 |
| 147 | g4293857 | 672 | 946 |
| 147 | 2992317H1 | 816 | 1097 |
| 147 | 5643301R6 | 823 | 1114 |
| 147 | 5643301R8 | 939 | 1115 |
| 148 | g3742856 | 2099 | 2440 |
| 148 | g1903217 | 1 | 2439 |
| 148 | 7183853H1 | 1 | 319 |
| 148 | g3665358 | 2048 | 2440 |
| 148 | 6282319H1 | 2330 | 2439 |
| 148 | g3931095 | 2387 | 2439 |
| 148 | g1487041 | 2284 | 2448 |
| 148 | g1365146 | 1897 | 2439 |
| 148 | g1487088 | 1978 | 2188 |
| 148 | 7183071H1 | 2 | 532 |
| 148 | 7184162H1 | 6 | 440 |
| 148 | 7182312H1 | 265 | 747 |
| 148 | g1365200 | 1875 | 2451 |
| 149 | 6807937J1 | 1 | 617 |
| 149 | 934453R6 | 169 | 650 |
| 149 | 934453T6 | 169 | 578 |
| 149 | 934453H1 | 169 | 430 |
| 150 | g2356671 | 1 | 436 |
| 150 | 3878737H1 | 255 | 511 |
| 151 | 3613937H1 | 1 | 286 |
| 151 | 3613937F6 | 1 | 551 |
| 151 | 3356375H1 | 14 | 272 |
| 151 | 4365653H1 | 26 | 279 |
| 151 | 3133682F6 | 168 | 468 |
| 151 | 3133682H1 | 168 | 446 |
| 151 | 2784431H2 | 322 | 410 |
| 151 | 4760428H1 | 378 | 661 |
| 151 | g1987179 | 426 | 713 |
| 151 | 3985930H1 | 427 | 714 |
| 151 | g3840682 | 469 | 880 |
| 151 | 6619463H1 | 506 | 1081 |
| 151 | g3594561 | 524 | 876 |
| 151 | 3613937T6 | 562 | 835 |
| 151 | 6148958H1 | 732 | 1299 |
| 151 | 5067091H1 | 1 | 243 |
| 151 | 2583002H1 | 33 | 298 |
| 151 | 2583002F6 | 33 | 533 |
| 151 | g273554 | 104 | 290 |
| 152 | 70255820V1 | 1 | 485 |
| 152 | 70249242V1 | 70 | 324 |
| 152 | 70254597V1 | 114 | 627 |
| 152 | 70254754V1 | 114 | 607 |
| 152 | 70254688V1 | 137 | 517 |
| 152 | 70255790V1 | 244 | 565 |
| 152 | 70255539V1 | 507 | 565 |
| 152 | 70255201V1 | 514 | 565 |
| 153 | g4194301 | 1 | 458 |
| 153 | g3244448 | 3 | 471 |
| 153 | g3804087 | 5 | 421 |
| 153 | 2383032T6 | 46 | 518 |
| 153 | 70046632V1 | 217 | 736 |
| 153 | 70046986V1 | 102 | 652 |
| 153 | 70047134V1 | 98 | 553 |
| 153 | 6208108H1 | 1 | 540 |
| 153 | 70046575V1 | 96 | 533 |
| 153 | 70047390V1 | 97 | 515 |
| 153 | 2383032F6 | 1 | 492 |
| 153 | 4938245H1 | 119 | 406 |
| 153 | 70047509V1 | 11 | 414 |
| 153 | 2383032H1 | 1 | 228 |
| 153 | 1952540H1 | 1 | 157 |
| 153 | 70046695V1 | 11 | 94 |
| 154 | 750543H1 | 1 | 183 |
| 154 | g1474315 | 42 | 323 |
| 154 | 3722596H1 | 61 | 333 |
| 154 | 4875149F6 | 70 | 195 |
| 154 | 4875149H1 | 70 | 257 |
| 154 | 6561179H1 | 71 | 633 |
| 154 | 2029094H1 | 121 | 372 |
| 154 | 5950630H1 | 125 | 405 |
| 154 | 5950410H1 | 125 | 401 |
| 154 | 4933727H1 | 239 | 384 |
| 154 | 3533254H1 | 273 | 564 |
| 154 | 4875149T6 | 344 | 737 |
| 154 | g3202357 | 457 | 784 |
| 154 | 748032H1 | 574 | 776 |
| 155 | 3751233H1 | 577 | 867 |
| 155 | 5812189H1 | 644 | 840 |
| 155 | 5812190H1 | 644 | 845 |
| 155 | 311752H1 | 657 | 744 |
| 155 | 373638H1 | 663 | 880 |
| 155 | 6333709H1 | 705 | 1240 |
| 155 | 6329688H1 | 705 | 1325 |
| 155 | 7080559H1 | 760 | 1170 |
| 155 | 6532643H1 | 803 | 1384 |
| 155 | 6141236T8 | 989 | 1579 |
| 155 | 4068325T6 | 1018 | 1641 |
| 155 | 7068876H1 | 1069 | 1483 |
| 155 | 3256362H1 | 1308 | 1554 |
| 155 | g1400213 | 1337 | 1682 |
| 155 | g3254782 | 1346 | 1682 |
| 155 | g1383466 | 1395 | 1696 |
| 155 | 6412487H1 | 1494 | 1931 |
| 155 | 5534143H1 | 1578 | 1820 |
| 155 | 6869946H1 | 1717 | 2275 |
| 155 | g4510725 | 1831 | 2272 |
| 155 | 6298042H1 | 1871 | 2146 |
| 155 | g1998847 | 1973 | 2275 |
| 155 | 3541104H1 | 1991 | 2272 |
| 155 | 5499626H1 | 1 | 255 |
| 155 | 5500309H1 | 1 | 227 |
| 155 | 5500026H1 | 1 | 161 |
| 155 | 5499909H1 | 1 | 206 |
| 155 | 2723940H1 | 1 | 243 |
| 155 | 2723940F6 | 1 | 333 |
| 155 | 5643224H1 | 22 | 276 |
| 155 | 3126704H1 | 22 | 298 |
| 155 | g1998848 | 22 | 296 |
| 155 | 3256088H1 | 24 | 259 |
| 155 | 1728945H1 | 26 | 246 |
| 155 | 6141236F8 | 28 | 633 |
| 155 | 6141236H1 | 28 | 370 |
| 155 | 6328822H1 | 47 | 592 |
| 155 | 3388023H1 | 89 | 361 |
| 155 | 6134014H1 | 110 | 401 |
| 155 | 3323733H1 | 192 | 461 |
| 155 | 3409854H1 | 357 | 618 |
| 155 | 4068325F6 | 515 | 1108 |
| 155 | 4068325H1 | 517 | 804 |
| 155 | 3629455H1 | 560 | 835 |
| 156 | 7006557H1 | 1 | 488 |
| 157 | 6459173H2 | 4960 | 5300 |
| 157 | 71034189V1 | 3224 | 3885 |
| 157 | 71033929V1 | 3308 | 3912 |
| 157 | g2166710 | 3325 | 3492 |
| 157 | 71239210V1 | 3365 | 4028 |
| 157 | 71035047V1 | 3406 | 3932 |
| 157 | 71035847V1 | 3407 | 3932 |
| 157 | 71239003V1 | 3407 | 3934 |
| 157 | 7252515J2 | 3410 | 3964 |
| 157 | 617587H1 | 3462 | 3716 |
| 157 | 617587R6 | 3464 | 3954 |
| 157 | 71035452V1 | 3487 | 4142 |
| 157 | 71239589V1 | 3548 | 4177 |
| 157 | 71034494V1 | 3565 | 4148 |
| 157 | 71036467V1 | 3574 | 4249 |
| 157 | 71019079V1 | 3590 | 4079 |
| 157 | 71034628V1 | 3600 | 4175 |
| 157 | 71033566V1 | 3603 | 3776 |
| 157 | 71033563V1 | 3605 | 4306 |
| 157 | 71033740V1 | 3642 | 4142 |
| 157 | 71034052V1 | 3692 | 4322 |
| 157 | 2852347H1 | 3699 | 3792 |
| 157 | 71034523V1 | 3759 | 4400 |
| 157 | 71021626V1 | 3780 | 4091 |
| 157 | 71033276V1 | 3784 | 4394 |
| 157 | 71035439V1 | 3832 | 4224 |
| 157 | 71239794V1 | 3841 | 4296 |
| 157 | 71036851V1 | 3933 | 4532 |
| 157 | 2902436H1 | 4020 | 4325 |
| 157 | 71035620V1 | 4052 | 4596 |
| 157 | 617587T6 | 4094 | 4694 |
| 157 | 71240672V1 | 4243 | 4499 |
| 157 | g2839119 | 4251 | 4718 |
| 157 | 71239718V1 | 4264 | 4729 |
| 157 | 71240638V1 | 4263 | 4415 |
| 157 | g2716554 | 4274 | 4723 |
| 157 | 2839872F6 | 4473 | 4873 |
| 157 | 2839872H2 | 4473 | 4724 |
| 157 | 6701187H1 | 4517 | 5071 |
| 157 | 71033989V1 | 4552 | 4713 |
| 157 | 6700916H1 | 4758 | 5106 |
| 157 | g1353781 | 1 | 3523 |
| 157 | 7183461H1 | 8 | 510 |
| 157 | 5878868F8 | 38 | 589 |
| 157 | 5878868T9 | 38 | 467 |
| 157 | 5878868H1 | 40 | 300 |
| 157 | 6621194J1 | 465 | 1063 |
| 157 | 7044151H1 | 1537 | 2130 |
| 157 | 7115836H2 | 1721 | 2207 |
| 157 | 6891967H1 | 1744 | 2304 |
| 157 | 7112010H2 | 2069 | 2273 |
| 157 | 7115993H2 | 2217 | 2833 |
| 157 | 71036402V1 | 2382 | 2971 |
| 157 | 71036528V1 | 2382 | 2844 |
| 157 | 71036302V1 | 2382 | 2836 |
| 157 | 5682881F6 | 2382 | 2755 |
| 157 | 5682881H1 | 2382 | 2556 |
| 157 | 7121747H1 | 2421 | 3009 |
| 157 | 6554467H1 | 2459 | 2877 |
| 157 | 71035730V1 | 2859 | 3427 |
| 157 | 71034930V1 | 2861 | 3427 |
| 157 | 5693974H1 | 2871 | 3141 |
| 157 | 71033786V1 | 2880 | 3524 |
| 157 | 71239770V1 | 2904 | 3495 |
| 157 | 71036410V1 | 2922 | 3457 |
| 157 | 71036110V1 | 2922 | 3457 |
| 157 | 71036841V1 | 2925 | 3050 |
| 157 | 71238907V1 | 3000 | 3542 |
| 157 | 71033235V1 | 3023 | 3512 |
| 157 | 71239855V1 | 3037 | 3682 |
| 157 | 71035104V1 | 3060 | 3655 |
| 157 | 71240132V1 | 3064 | 3600 |
| 157 | 71022089V1 | 3064 | 3174 |
| 157 | 71020694V1 | 3064 | 3173 |
| 157 | 71033750V1 | 3068 | 3576 |
| 157 | 71036780V1 | 3070 | 3575 |
| 157 | 71240343V1 | 3074 | 3590 |
| 157 | 71035904V1 | 3096 | 3656 |
| 157 | 71239106V1 | 3098 | 3535 |
| 157 | 71239593V1 | 3107 | 3663 |
| 157 | 71036268V1 | 3116 | 3650 |
| 157 | 71033766V1 | 3130 | 3794 |
| 157 | 71036727V1 | 3136 | 3763 |
| 157 | 71036255V1 | 3150 | 3690 |
| 157 | 3246035H1 | 3163 | 3414 |
| 157 | 71236782V1 | 3177 | 3581 |
| 157 | 71034117V1 | 3225 | 3899 |
| 158 | 2702437H1 | 3382 | 3692 |
| 158 | 2028546H1 | 3382 | 3674 |
| 158 | 70469621V1 | 3384 | 3974 |
| 158 | 70477624V1 | 3362 | 3551 |
| 158 | 70464393V1 | 3358 | 3664 |
| 158 | 2028546R6 | 3382 | 3697 |
| 158 | 897912H1 | 3532 | 3695 |
| 158 | 2657383H1 | 3542 | 3682 |
| 158 | 70466432V1 | 3600 | 4154 |
| 158 | 3405032H1 | 2336 | 2592 |
| 158 | 3099417H1 | 2407 | 2687 |
| 158 | 70467835V1 | 2535 | 3117 |
| 158 | 3936618H1 | 2535 | 2799 |
| 158 | 70468637V1 | 2538 | 3232 |
| 158 | 70465732V1 | 3029 | 3708 |
| 158 | g4568142 | 3029 | 3550 |
| 158 | 70477055V1 | 3050 | 3634 |
| 158 | 70479313V1 | 3061 | 3562 |
| 158 | 70480477V1 | 3075 | 3701 |
| 158 | 70480157V1 | 3098 | 3662 |
| 158 | 4564168H1 | 3087 | 3365 |
| 158 | 70466004V1 | 3018 | 3732 |
| 158 | 70478380V1 | 3019 | 3638 |
| 158 | 4557976H1 | 3015 | 3240 |
| 158 | 3618747H1 | 1905 | 2177 |
| 158 | 6510691H1 | 1907 | 2199 |
| 158 | 6510634H1 | 1907 | 2192 |
| 158 | 6510739H1 | 1907 | 2183 |
| 158 | 4554621H1 | 2044 | 2312 |
| 158 | 70464785V1 | 2168 | 2732 |
| 158 | 4554554F6 | 2168 | 2649 |
| 158 | 4554554H1 | 2168 | 2409 |
| 158 | 70466681V1 | 2298 | 2736 |
| 158 | 70467583V1 | 2823 | 3476 |
| 158 | 70480720V1 | 2857 | 3511 |
| 158 | 70479363V1 | 2850 | 3206 |
| 158 | 70476260V1 | 2859 | 3447 |
| 158 | 70481657V1 | 2790 | 3146 |
| 158 | 70466450V1 | 2775 | 3513 |
| 158 | 70476879V1 | 2765 | 3450 |
| 158 | 70477920V1 | 2806 | 3426 |
| 158 | 70466934V1 | 2704 | 3432 |
| 158 | 70465560V1 | 3293 | 3609 |
| 158 | 70476467V1 | 3297 | 3594 |
| 158 | 70479516V1 | 3309 | 3697 |
| 158 | 4792962H1 | 3311 | 3605 |
| 158 | 70467134V1 | 3311 | 3697 |
| 158 | 4554470H1 | 3317 | 3600 |
| 158 | 70466403V1 | 3271 | 3697 |
| 158 | 70480199V1 | 3270 | 3697 |
| 158 | 70469816V1 | 3293 | 3654 |
| 158 | 70468353V1 | 3282 | 3697 |
| 158 | 70481137V1 | 3205 | 3697 |
| 158 | 70466975V1 | 3210 | 3697 |
| 158 | 70466049V1 | 3236 | 3697 |
| 158 | 70478359V1 | 3235 | 3666 |
| 158 | 6515587H1 | 3242 | 3671 |
| 158 | 70478211V1 | 3217 | 3682 |
| 158 | 4558722H1 | 1289 | 1534 |
| 158 | 3618747F6 | 1904 | 2401 |
| 158 | g190751 | 50 | 3497 |
| 158 | g1736195 | 979 | 1234 |
| 158 | 2624295R6 | 1016 | 1412 |
| 158 | 2624295H1 | 1016 | 1225 |
| 158 | 70466944V1 | 3104 | 3692 |
| 158 | 70480113V1 | 3129 | 3556 |
| 158 | 70468718V1 | 3142 | 3695 |
| 158 | 70477732V1 | 3142 | 3772 |
| 158 | 70469007V1 | 3149 | 3697 |
| 158 | 70469207V1 | 3322 | 3657 |
| 158 | 70480324V1 | 3326 | 3682 |
| 158 | 70466503V1 | 3328 | 4068 |
| 158 | 70479148V1 | 3328 | 3697 |
| 158 | 70464268V1 | 3329 | 3697 |
| 158 | 70466743V1 | 3331 | 3487 |
| 158 | 70467082V1 | 3389 | 3682 |
| 158 | 70481575V1 | 3408 | 3682 |
| 158 | 3381962H1 | 3429 | 3697 |
| 158 | 70468987V1 | 3435 | 3682 |
| 158 | 70465226V1 | 3440 | 3697 |
| 158 | 70466253V1 | 2697 | 3264 |
| 158 | 70469171V1 | 2699 | 3374 |
| 158 | 70469220V1 | 2765 | 3324 |
| 158 | 70481022V1 | 2759 | 3486 |
| 158 | 2624295T6 | 2762 | 3351 |
| 158 | 70469934V1 | 2769 | 3329 |
| 158 | 70480048V1 | 2644 | 3023 |
| 158 | 70478224V1 | 2650 | 3136 |
| 158 | 70467878V1 | 2660 | 3107 |
| 158 | 70481284V1 | 2587 | 3175 |
| 158 | 70467582V1 | 2607 | 3072 |
| 158 | 70465805V1 | 2630 | 3318 |
| 158 | 70481125V1 | 2624 | 3464 |
| 158 | 70469427V1 | 2642 | 3286 |
| 158 | 6287762H2 | 1 | 475 |
| 158 | 70478180V1 | 2901 | 3570 |
| 158 | 70465864V1 | 2900 | 3534 |
| 158 | 70479279V1 | 2923 | 3570 |
| 158 | 70476782V1 | 2927 | 3466 |
| 158 | 70469166V1 | 2935 | 3628 |
| 158 | 70476816V1 | 2992 | 3529 |
| 158 | 70480392V1 | 2746 | 3208 |
| 158 | 70478255V1 | 2751 | 3368 |
| 158 | 70478182V1 | 3467 | 4041 |
| 158 | 70498607V1 | 3496 | 3697 |
| 158 | 70465130V1 | 3440 | 3697 |
| 158 | 2301520H1 | 3457 | 3705 |
| 158 | 70467663V1 | 3171 | 3800 |
| 158 | 70479112V1 | 3208 | 3697 |
| 158 | 70467111V1 | 2890 | 3430 |
| 158 | 4562810H1 | 2883 | 3182 |
| 158 | 70473226V1 | 2882 | 3252 |
| 158 | 2620793H1 | 2886 | 3178 |
| 158 | 70464811V1 | 2708 | 3359 |
| 158 | 70481798V1 | 2721 | 3378 |
| 158 | 70478794V1 | 2722 | 3354 |
| 158 | 70467700V1 | 2732 | 3434 |
| 158 | 70481589V1 | 2742 | 3428 |
| 158 | 70466101V1 | 3337 | 3682 |
| 158 | 70468914V1 | 3348 | 3697 |
| 158 | 70479545V1 | 3359 | 3667 |
| 159 | 3874759H1 | 1 | 296 |
| 159 | 3685395H1 | 3 | 271 |
| 159 | 3692640H1 | 4 | 270 |
| 159 | 3692640F6 | 4 | 342 |
| 159 | g3116688 | 4 | 443 |
| 159 | 3445829H2 | 6 | 264 |
| 159 | 306745H1 | 13 | 386 |
| 159 | 945423H1 | 11 | 293 |
| 159 | 988248R1 | 179 | 383 |
| 159 | 988248H1 | 179 | 291 |
| 159 | 4454887H1 | 250 | 519 |
| 159 | 3877090H1 | 350 | 619 |
| 159 | 6901148H1 | 368 | 825 |
| 159 | 3028782F6 | 505 | 841 |
| 159 | 3028782H1 | 505 | 807 |
| 159 | 1005592H1 | 599 | 889 |
| 159 | 4646393H1 | 801 | 1061 |
| 159 | 5278286H1 | 912 | 1125 |
| 159 | 2521969F6 | 950 | 1354 |
| 159 | 983403H1 | 1063 | 1335 |
| 159 | 983403R6 | 1064 | 1315 |
| 159 | 188949H1 | 1106 | 1306 |
| 159 | 983403T6 | 1123 | 1347 |
| 159 | 988925H1 | 1126 | 1349 |
| 159 | 2521969H1 | 1129 | 1354 |
| 159 | 2639257H1 | 1177 | 1339 |
| 159 | 983273H1 | 1241 | 1544 |
| 159 | 3692640T6 | 1247 | 1832 |
| 159 | 4013213H1 | 1308 | 1598 |
| 159 | 3877453H1 | 1331 | 1614 |
| 159 | 4010336H1 | 1328 | 1611 |
| 159 | 2324266H1 | 1337 | 1579 |
| 159 | 3011865F6 | 1340 | 1761 |
| 159 | 3576519H1 | 1339 | 1495 |
| 159 | 5176829H1 | 1348 | 1600 |
| 159 | 3873606H1 | 1351 | 1661 |
| 159 | 4852614H1 | 1363 | 1587 |
| 159 | 3016113F6 | 1376 | 1647 |
| 159 | 3011865H1 | 1376 | 1459 |
| 159 | 058529H1 | 1376 | 1522 |
| 159 | 3958442H1 | 1377 | 1474 |
| 159 | 5276870H1 | 1376 | 1535 |
| 159 | 3578346H1 | 1382 | 1634 |
| 159 | 3016113H1 | 1383 | 1669 |
| 159 | 6337413H1 | 1390 | 1507 |
| 159 | 6338013H1 | 1390 | 1881 |
| 159 | 6335720H1 | 1390 | 1883 |
| 159 | 3688195H1 | 1398 | 1695 |
| 159 | 4151882H1 | 1401 | 1641 |
| 159 | 3874704H1 | 1439 | 1714 |
| 159 | 5169119H1 | 1476 | 1610 |
| 159 | 5278359H1 | 1475 | 1705 |
| 159 | 3685458H1 | 1486 | 1783 |
| 159 | 6332978H1 | 1487 | 1982 |
| 159 | 5531678H1 | 1495 | 1624 |
| 159 | g5395484 | 1513 | 1854 |
| 159 | 3693626H1 | 1512 | 1804 |
| 159 | 4152946H1 | 1520 | 1792 |
| 159 | 3875504H1 | 1549 | 1851 |
| 159 | 3890704H1 | 1548 | 1842 |
| 159 | 4466716H1 | 1582 | 1839 |
| 159 | g395449 | 1591 | 1923 |
| 159 | 5167337H1 | 1592 | 1800 |
| 159 | 920392H1 | 1611 | 1923 |
| 159 | 3011865T6 | 1618 | 1972 |
| 159 | 3016113T6 | 1674 | 2155 |
| 159 | 5277911H1 | 1697 | 1935 |
| 159 | 2636153H1 | 1700 | 1929 |
| 159 | 1567405H1 | 1706 | 1889 |
| 159 | 462513H1 | 1706 | 1931 |
| 159 | 462513R6 | 1706 | 2044 |
| 159 | 3877471H1 | 1721 | 1990 |
| 159 | 5277625H1 | 1723 | 1973 |
| 159 | 3016674H1 | 1739 | 2024 |
| 159 | 3045188H1 | 1739 | 2025 |
| 159 | 977605T1 | 1764 | 2179 |
| 159 | 5299216H1 | 1761 | 2001 |
| 159 | 977605H1 | 1764 | 2075 |
| 159 | 977605R1 | 1764 | 2143 |
| 159 | 3028782T6 | 1767 | 2194 |
| 159 | 3487465H1 | 1765 | 2054 |
| 159 | 462261H1 | 1817 | 2014 |
| 159 | 5170457H1 | 1823 | 2011 |
| 159 | 3683935H1 | 1823 | 2109 |
| 159 | 5803204H1 | 1826 | 2024 |
| 159 | 979691H1 | 1836 | 2120 |
| 159 | g434193 | 1852 | 2026 |
| 159 | 3013979H1 | 1877 | 2169 |
| 159 | 921802H1 | 1888 | 2214 |
| 159 | 920885H1 | 1888 | 2204 |
| 159 | 5278931H1 | 1996 | 2214 |
| 159 | 058768H1 | 1998 | 2201 |
| 159 | 3045908H1 | 2013 | 2281 |
| 159 | g2787073 | 2048 | 2207 |
| 160 | g6086623 | 4494 | 4929 |
| 160 | g2569620 | 4498 | 4936 |
| 160 | g2754538 | 4500 | 4930 |
| 160 | 3022465H1 | 4515 | 4743 |
| 160 | 2448511H1 | 4519 | 4765 |
| 160 | 3760535H1 | 4524 | 4835 |
| 160 | 2640174H1 | 4524 | 4780 |
| 160 | 517085T6 | 4532 | 4894 |
| 160 | 5338680H1 | 4533 | 4719 |
| 160 | 735966R1 | 4536 | 4961 |
| 160 | 735966H1 | 4536 | 4780 |
| 160 | 1592447H1 | 4536 | 4749 |
| 160 | 1591916H1 | 4536 | 4740 |
| 160 | 5022872H1 | 4538 | 4830 |
| 160 | g3253612 | 4546 | 4951 |
| 160 | g3843392 | 4553 | 4929 |
| 160 | g3843398 | 4554 | 4929 |
| 160 | g4080952 | 4558 | 4936 |
| 160 | 3814494H1 | 4561 | 4861 |
| 160 | 2009809H1 | 4568 | 4749 |
| 160 | g1271129 | 4575 | 4962 |
| 160 | g1068131 | 4586 | 4910 |
| 160 | 2096906H1 | 4584 | 4854 |
| 160 | 2603246H1 | 4589 | 4881 |
| 160 | g829798 | 4598 | 4943 |
| 160 | g1068126 | 4598 | 4905 |
| 160 | 2006525H1 | 4597 | 4764 |
| 160 | 628342H1 | 4598 | 4863 |
| 160 | 1943588H1 | 4599 | 4852 |
| 160 | g1044543 | 4602 | 4916 |
| 160 | g777642 | 4610 | 4930 |
| 160 | 2685217H1 | 4607 | 4864 |
| 160 | 1365826H1 | 4615 | 4876 |
| 160 | 1365826R1 | 4615 | 4941 |
| 160 | 1365826T1 | 4615 | 4910 |
| 160 | 6371841H1 | 4621 | 4912 |
| 160 | g1525497 | 4622 | 4933 |
| 160 | 5704503H1 | 4643 | 4918 |
| 160 | 4060183H1 | 4644 | 4927 |
| 160 | 1416579H1 | 4644 | 4915 |
| 160 | 1416547H1 | 4644 | 4908 |
| 160 | 4569760H2 | 4658 | 4921 |
| 160 | 3721940H1 | 4651 | 4962 |
| 160 | g852574 | 4663 | 4906 |
| 160 | g1023637 | 4669 | 4890 |
| 160 | 3712504H1 | 4671 | 4971 |
| 160 | 4825195H1 | 4672 | 4924 |
| 160 | g985536 | 4678 | 4902 |
| 160 | 3568055H1 | 4680 | 4986 |
| 160 | g2819448 | 4690 | 4932 |
| 160 | g1024915 | 4694 | 4924 |
| 160 | g4125247 | 4702 | 4939 |
| 160 | 4254485T8 | 4705 | 4940 |
| 160 | 5714026H1 | 4707 | 4991 |
| 160 | 770816R1 | 4713 | 5202 |
| 160 | 770816H1 | 4713 | 4968 |
| 160 | 1901241H1 | 4719 | 4976 |
| 160 | 1898941H1 | 4719 | 4974 |
| 160 | g2903316 | 4724 | 4936 |
| 160 | 6715734H1 | 4726 | 4923 |
| 160 | 2897118H1 | 4729 | 4947 |
| 160 | 986309R1 | 4747 | 5145 |
| 160 | 986309H1 | 4747 | 5067 |
| 160 | 986309T1 | 4747 | 5241 |
| 160 | g2837150 | 4762 | 5278 |
| 160 | 2027901H1 | 4764 | 5060 |
| 160 | 2654529H1 | 4773 | 4942 |
| 160 | g3057209 | 4773 | 5234 |
| 160 | 5871918H1 | 4775 | 5080 |
| 160 | g3735780 | 4799 | 5287 |
| 160 | g5424599 | 4804 | 5282 |
| 160 | g4598235 | 4806 | 5285 |
| 160 | g4684860 | 4807 | 5285 |
| 160 | g5367615 | 4807 | 5287 |
| 160 | g4437224 | 4810 | 5285 |
| 160 | 4790610H1 | 4810 | 4940 |
| 160 | g3412956 | 4812 | 5285 |
| 160 | 1212364H1 | 4813 | 5002 |
| 160 | g4153588 | 4815 | 5285 |
| 160 | g3050313 | 4816 | 5285 |
| 160 | 4340133H1 | 4817 | 5098 |
| 160 | g4071897 | 4821 | 5290 |
| 160 | g4762931 | 4823 | 5287 |
| 160 | g4393968 | 4823 | 5287 |
| 160 | 6872074H1 | 4828 | 5313 |
| 160 | g3308744 | 4829 | 5293 |
| 160 | g3887256 | 4843 | 5287 |
| 160 | g5811461 | 4843 | 5285 |
| 160 | g4372712 | 4842 | 5285 |
| 160 | g3597624 | 4846 | 5291 |
| 160 | g3869879 | 4848 | 5286 |
| 160 | 4201581H1 | 4848 | 4946 |
| 160 | g4081955 | 4853 | 5290 |
| 160 | g3840562 | 4854 | 5286 |
| 160 | g5809990 | 4854 | 5270 |
| 160 | 4129277H2 | 4854 | 5127 |
| 160 | g5904237 | 4855 | 5278 |
| 160 | g4969558 | 4856 | 5276 |
| 160 | g4292330 | 4857 | 5288 |
| 160 | g5849107 | 4857 | 5291 |
| 160 | 3621721H1 | 4856 | 5149 |
| 160 | g4987769 | 4863 | 4936 |
| 160 | 347302H1 | 4867 | 5086 |
| 160 | 5408358H1 | 4872 | 5129 |
| 160 | g3896761 | 4879 | 5287 |
| 160 | g3279962 | 4892 | 5285 |
| 160 | g4244340 | 4895 | 5285 |
| 160 | g3658851 | 4903 | 5285 |
| 160 | g4983854 | 4906 | 5285 |
| 160 | 5388769H1 | 4911 | 5186 |
| 160 | 6215533H1 | 4912 | 5285 |
| 160 | 5388768H1 | 4911 | 5186 |
| 160 | g2816194 | 4920 | 5285 |
| 160 | g5547017 | 4930 | 5287 |
| 160 | g4089434 | 4932 | 5285 |
| 160 | g1484540 | 4934 | 5285 |
| 160 | 1739863R6 | 4940 | 5237 |
| 160 | 1739863H1 | 4940 | 5170 |
| 160 | 4207604H1 | 4940 | 5116 |
| 160 | 5578672H1 | 4950 | 5211 |
| 160 | 1689363H1 | 4952 | 5138 |
| 160 | 2606160H1 | 4957 | 5207 |
| 160 | 2007185H1 | 4999 | 5202 |
| 160 | g795782 | 5014 | 5285 |
| 160 | 6613821H1 | 5033 | 5165 |
| 160 | 4772611H1 | 5036 | 5285 |
| 160 | 4923819H1 | 5037 | 5285 |
| 160 | g1188096 | 5040 | 5232 |
| 160 | g2540711 | 5047 | 5403 |
| 160 | g2022546 | 5046 | 5285 |
| 160 | 3445038H1 | 5046 | 5257 |
| 160 | g5447532 | 5058 | 5345 |
| 160 | 3486818H1 | 5071 | 5285 |
| 160 | g1479409 | 5084 | 5403 |
| 160 | g1064422 | 5084 | 5269 |
| 160 | g2821180 | 5087 | 5406 |
| 160 | g1543936 | 5098 | 5408 |
| 160 | 2769102H1 | 5102 | 5271 |
| 160 | g815309 | 5131 | 5403 |
| 160 | g4893445 | 5128 | 5293 |
| 160 | 1923809H1 | 5134 | 5289 |
| 160 | g29237 | 5139 | 5403 |
| 160 | g1548590 | 5143 | 5406 |
| 160 | g1202222 | 5146 | 5319 |
| 160 | g3202374 | 5145 | 5288 |
| 160 | g1665338 | 5149 | 5271 |
| 160 | g1228664 | 5151 | 5285 |
| 160 | 7336808H1 | 5161 | 5339 |
| 160 | 2807655H1 | 5176 | 5279 |
| 160 | 1741769R6 | 5216 | 5354 |
| 160 | 1741769H1 | 5216 | 5339 |
| 160 | 1741195H1 | 5216 | 5339 |
| 160 | 1741769T6 | 5216 | 5302 |
| 160 | g810674 | 5258 | 5404 |
| 160 | g944127 | 5261 | 5394 |
| 160 | 4125568H1 | 4959 | 5163 |
| 160 | g6464630 | 4967 | 5403 |
| 160 | g1501886 | 4969 | 5294 |
| 160 | 4537948H1 | 4971 | 5252 |
| 160 | 4699937H1 | 4974 | 5159 |
| 160 | g3038275 | 4981 | 5352 |
| 160 | g1664143 | 4988 | 5339 |
| 160 | 1283369T6 | 4991 | 5295 |
| 160 | 1283369F6 | 4997 | 5350 |
| 160 | 1283369H1 | 4997 | 5277 |
| 160 | 056712H1 | 3755 | 4005 |
| 160 | g829797 | 3765 | 4195 |
| 160 | g852673 | 3767 | 4118 |
| 160 | g775984 | 3767 | 4023 |
| 160 | 2967706H1 | 3805 | 4117 |
| 160 | 2539208H1 | 3812 | 4049 |
| 160 | 2443012H1 | 3817 | 4068 |
| 160 | 988892H1 | 3821 | 4063 |
| 160 | 2291992H1 | 3821 | 4048 |
| 160 | 4178688H1 | 3822 | 4086 |
| 160 | 1833818H1 | 3831 | 4088 |
| 160 | 6368013H1 | 3838 | 4152 |
| 160 | 2134837H1 | 3858 | 4104 |
| 160 | 5657126H1 | 3862 | 4145 |
| 160 | g1665244 | 3871 | 4196 |
| 160 | 2288056H1 | 3873 | 4122 |
| 160 | 3740644H1 | 3903 | 4101 |
| 160 | 4714119H1 | 3904 | 4202 |
| 160 | 5352624H1 | 3913 | 4159 |
| 160 | g1272802 | 3939 | 4460 |
| 160 | 6388078H1 | 3935 | 4238 |
| 160 | 3056718H1 | 3936 | 4205 |
| 160 | g1044542 | 3941 | 4227 |
| 160 | g1525554 | 3942 | 4231 |
| 160 | g1625857 | 3970 | 4363 |
| 160 | g1977647 | 3972 | 4318 |
| 160 | 056202H1 | 3982 | 4165 |
| 160 | 1259638H1 | 4000 | 4255 |
| 160 | 1259479F1 | 4000 | 4527 |
| 160 | 1259638F1 | 4000 | 4492 |
| 160 | 4383783H1 | 4010 | 4274 |
| 160 | g1440113 | 4032 | 4192 |
| 160 | 6856341H1 | 4048 | 4572 |
| 160 | g944630 | 4051 | 4388 |
| 160 | 5950009H1 | 4064 | 4381 |
| 160 | g1240400 | 4066 | 4202 |
| 160 | 5387777H1 | 4076 | 4340 |
| 160 | 4342232H1 | 4088 | 4243 |
| 160 | 3022534H1 | 4093 | 4335 |
| 160 | 293402R6 | 4110 | 4551 |
| 160 | 293402H1 | 4110 | 4227 |
| 160 | 2772843H1 | 4110 | 4346 |
| 160 | 2411009H1 | 4125 | 4343 |
| 160 | 2819785H1 | 4126 | 4424 |
| 160 | 4512962H1 | 4131 | 4407 |
| 160 | g1978183 | 4133 | 4478 |
| 160 | g4152729 | 4145 | 4491 |
| 160 | 1690358H1 | 4144 | 4422 |
| 160 | 6334629H1 | 4149 | 4624 |
| 160 | 5387664H1 | 4149 | 4413 |
| 160 | 6334630H1 | 4149 | 4622 |
| 160 | 4600162H1 | 4153 | 4447 |
| 160 | g5673211 | 4161 | 4640 |
| 160 | 055138H1 | 4167 | 4394 |
| 160 | g4648135 | 4168 | 4628 |
| 160 | 986584H1 | 4169 | 4465 |
| 160 | 986584R1 | 4169 | 4584 |
| 160 | 2290964H1 | 4171 | 4423 |
| 160 | 3056037H1 | 4188 | 4464 |
| 160 | 2784447H2 | 4197 | 4434 |
| 160 | 3567327H1 | 4199 | 4491 |
| 160 | 4135683H1 | 4235 | 4471 |
| 160 | 3789022H1 | 4276 | 4550 |
| 160 | 4833507H1 | 4282 | 4552 |
| 160 | 2285967H1 | 4282 | 4510 |
| 160 | 3469203H1 | 4288 | 4433 |
| 160 | 4573834H1 | 4295 | 4553 |
| 160 | g2006388 | 4295 | 4536 |
| 160 | g810580 | 4327 | 4574 |
| 160 | 4140391H1 | 4331 | 4620 |
| 160 | g2825270 | 4341 | 4709 |
| 160 | g815902 | 4342 | 4600 |
| 160 | g2898761 | 4342 | 4764 |
| 160 | 6601487H1 | 4347 | 4413 |
| 160 | 3812509H1 | 4361 | 4570 |
| 160 | 5605594H1 | 4370 | 4614 |
| 160 | 5401012H1 | 4376 | 4636 |
| 160 | g1023636 | 4377 | 4603 |
| 160 | 056184H1 | 4376 | 4598 |
| 160 | g1060832 | 4378 | 4490 |
| 160 | 3253684H1 | 4392 | 4482 |
| 160 | g1501988 | 4392 | 4873 |
| 160 | 293402T6 | 4396 | 4872 |
| 160 | g2825431 | 4397 | 4710 |
| 160 | 4421168H1 | 4431 | 4671 |
| 160 | 2436027H1 | 4437 | 4685 |
| 160 | g5177561 | 4447 | 4930 |
| 160 | g797106 | 4448 | 4687 |
| 160 | g2874401 | 4448 | 4939 |
| 160 | g3597789 | 4460 | 4933 |
| 160 | 4649987H1 | 4465 | 4747 |
| 160 | 2920060H1 | 4466 | 4748 |
| 160 | g3675776 | 4469 | 4933 |
| 160 | 986389H1 | 4480 | 4623 |
| 160 | 6291011H1 | 4484 | 4747 |
| 160 | g5527815 | 4488 | 4941 |
| 160 | g6086615 | 4491 | 4929 |
| 160 | g1469867 | 1 | 5285 |
| 160 | 7086887H1 | 1 | 516 |
| 160 | 3287254H1 | 8 | 248 |
| 160 | g273451 | 81 | 456 |
| 160 | g1057697 | 186 | 523 |
| 160 | 3903676H1 | 189 | 440 |
| 160 | g434410 | 279 | 603 |
| 160 | 3698379H1 | 455 | 747 |
| 160 | 5643561H1 | 480 | 749 |
| 160 | 4960333H1 | 502 | 761 |
| 160 | g2277376 | 522 | 931 |
| 160 | 5090209H1 | 584 | 831 |
| 160 | 525014H1 | 602 | 841 |
| 160 | 525014R6 | 602 | 845 |
| 160 | 162678H1 | 741 | 981 |
| 160 | 6332784H1 | 1028 | 1600 |
| 160 | 3872857H1 | 1053 | 1308 |
| 160 | 525014T6 | 1109 | 1587 |
| 160 | g395681 | 1123 | 1460 |
| 160 | g6086016 | 1169 | 1629 |
| 160 | g2779861 | 1232 | 1536 |
| 160 | g1057696 | 1305 | 1626 |
| 160 | 4806634H1 | 1367 | 1619 |
| 160 | 5864502H1 | 1415 | 1701 |
| 160 | 156350R6 | 1439 | 1717 |
| 160 | 156350H1 | 1439 | 1616 |
| 160 | 5502785H1 | 1447 | 1672 |
| 160 | 4696595H1 | 1488 | 1665 |
| 160 | g3701554 | 1534 | 1625 |
| 160 | 3825811H1 | 1546 | 1852 |
| 160 | 3825859H1 | 1546 | 1803 |
| 160 | g1880691 | 1643 | 1799 |
| 160 | g691032 | 1722 | 2124 |
| 160 | g573544 | 1722 | 2062 |
| 160 | g708679 | 1722 | 2043 |
| 160 | 6610185H1 | 1732 | 2259 |
| 160 | 1257342H1 | 1775 | 2018 |
| 160 | 2532881H1 | 1859 | 2182 |
| 160 | g3416512 | 1887 | 2323 |
| 160 | 2722041H1 | 1915 | 2155 |
| 160 | 7191660H2 | 2044 | 2659 |
| 160 | 1804357H1 | 2065 | 2340 |
| 160 | 1806920H1 | 2065 | 2330 |
| 160 | 5602907H1 | 2082 | 2351 |
| 160 | 2830493H1 | 2090 | 2352 |
| 160 | 5542070H1 | 2153 | 2364 |
| 160 | 7171003H1 | 2174 | 2627 |
| 160 | 3109807H1 | 2202 | 2486 |
| 160 | 1439519H1 | 2327 | 2604 |
| 160 | 086846H1 | 2351 | 2417 |
| 160 | 6743069H1 | 2379 | 2880 |
| 160 | 5092027H1 | 2401 | 2674 |
| 160 | 3595466H1 | 2452 | 2678 |
| 160 | 3120055H1 | 2600 | 2875 |
| 160 | 4028493H1 | 2623 | 2861 |
| 160 | 6918376H1 | 2649 | 3021 |
| 160 | 833106R1 | 2689 | 3287 |
| 160 | 833106H1 | 2689 | 2941 |
| 160 | g1068214 | 2708 | 3062 |
| 160 | g1068219 | 2719 | 3068 |
| 160 | 386166H1 | 2777 | 3061 |
| 160 | 3163260H1 | 2798 | 3086 |
| 160 | 6490409H1 | 2830 | 3338 |
| 160 | 2122144H1 | 2851 | 3109 |
| 160 | g1484539 | 2902 | 3404 |
| 160 | 3120466H1 | 2924 | 3191 |
| 160 | g1062289 | 2966 | 3116 |
| 160 | 4178517H1 | 3003 | 3265 |
| 160 | 2505067H1 | 3016 | 3259 |
| 160 | 2505367H1 | 3016 | 3245 |
| 160 | 7034903H1 | 3023 | 3630 |
| 160 | g1259693 | 3042 | 3222 |
| 160 | 7315867H1 | 3070 | 3471 |
| 160 | 5370265H1 | 3126 | 3359 |
| 160 | g2022547 | 3176 | 3463 |
| 160 | 2707316H1 | 3197 | 3502 |
| 160 | 2894887H1 | 3197 | 3446 |
| 160 | g796865 | 3229 | 3473 |
| 160 | 3523324H1 | 3238 | 3589 |
| 160 | g1479499 | 3257 | 3560 |
| 160 | g1548639 | 3257 | 3626 |
| 160 | g943258 | 3257 | 3559 |
| 160 | g1067965 | 3257 | 3571 |
| 160 | 5371320H1 | 3264 | 3396 |
| 160 | 4441134H1 | 3378 | 3656 |
| 160 | g682946 | 3380 | 3626 |
| 160 | 2029016H1 | 3406 | 3676 |
| 160 | 5665710H1 | 3409 | 3680 |
| 160 | 5544787H1 | 3408 | 3621 |
| 160 | g3405453 | 3410 | 3838 |
| 160 | g1225697 | 3410 | 3783 |
| 160 | g985312 | 3414 | 3790 |
| 160 | g944631 | 3420 | 3511 |
| 160 | 2471283H1 | 3421 | 3645 |
| 160 | 3561909H1 | 3421 | 3714 |
| 160 | g965314 | 3442 | 3674 |
| 160 | 2748973H1 | 3446 | 3719 |
| 160 | 5621772H1 | 3458 | 3598 |
| 160 | g1064141 | 3477 | 3785 |
| 160 | 7033911H1 | 3483 | 4011 |
| 160 | 517085H1 | 3502 | 3727 |
| 160 | 517085R6 | 3503 | 3982 |
| 160 | 4655472H1 | 3524 | 3710 |
| 160 | 3521721H1 | 3525 | 3865 |
| 160 | 2668464H1 | 3540 | 3800 |
| 160 | 2285765H1 | 3578 | 3795 |
| 160 | 2796870H1 | 3597 | 3846 |
| 160 | 2761118H1 | 3598 | 3859 |
| 160 | 5544423H1 | 3615 | 3699 |
| 160 | 338142H1 | 3622 | 3850 |
| 160 | 4545187H1 | 3627 | 3871 |
| 160 | 2243019H1 | 3628 | 3885 |
| 160 | 2772059H1 | 3629 | 3889 |
| 160 | 2960117H1 | 3636 | 3937 |
| 160 | g1969950 | 3641 | 4014 |
| 160 | g1947603 | 3654 | 3817 |
| 160 | 5002748H1 | 3687 | 3844 |
| 160 | 4062722H1 | 3721 | 4010 |
| 160 | 7107841H1 | 3740 | 4101 |
| 160 | g1024914 | 3749 | 4082 |
| 160 | 5546516H1 | 3750 | 3928 |
| 161 | g1219848 | 2061 | 2389 |
| 161 | 5406570H1 | 2061 | 2269 |
| 161 | 5451646H1 | 2063 | 2243 |
| 161 | g2000931 | 2063 | 2316 |
| 161 | 6517527H1 | 2068 | 2140 |
| 161 | 4426132H1 | 2214 | 2389 |
| 161 | 3468616H1 | 2068 | 2331 |
| 161 | 5451867H1 | 2073 | 2323 |
| 161 | 6441810H1 | 2085 | 2530 |
| 161 | 7076574H1 | 2068 | 2555 |
| 161 | 70346502D1 | 2070 | 2384 |
| 161 | 4772876H1 | 2073 | 2352 |
| 161 | 805234H1 | 2073 | 2269 |
| 161 | 6763871H1 | 2078 | 2569 |
| 161 | 7079082H1 | 2081 | 2565 |
| 161 | 6996593H1 | 2081 | 2575 |
| 161 | 5693746H1 | 2096 | 2319 |
| 161 | 4760746H1 | 2081 | 2371 |
| 161 | 4760754H1 | 2082 | 2371 |
| 161 | 3466673H1 | 2085 | 2180 |
| 161 | 3955495H1 | 2106 | 2385 |
| 161 | 3945275H1 | 2213 | 2490 |
| 161 | 6891449H1 | 2214 | 2316 |
| 161 | 4195061H1 | 2215 | 2518 |
| 161 | 3781801H1 | 2096 | 2379 |
| 161 | 2570710H1 | 2219 | 2467 |
| 161 | 4690839H1 | 2097 | 2352 |
| 161 | g683009 | 2100 | 2389 |
| 161 | 5682533H1 | 2099 | 2378 |
| 161 | 5575001H1 | 2106 | 2253 |
| 161 | 1505114H1 | 2127 | 2344 |
| 161 | 4091605H1 | 2114 | 2422 |
| 161 | 5832027H1 | 2123 | 2377 |
| 161 | 5401121H1 | 2219 | 2429 |
| 161 | 5388353H1 | 2219 | 2494 |
| 161 | 2704568H1 | 2127 | 2350 |
| 161 | 5834524H1 | 2132 | 2405 |
| 161 | 7103141H1 | 2155 | 2265 |
| 161 | 4315855H1 | 2139 | 2389 |
| 161 | 5834443H1 | 2139 | 2343 |
| 161 | 664952H1 | 2142 | 2367 |
| 161 | 1992383H1 | 2143 | 2344 |
| 161 | 3468549H1 | 2219 | 2487 |
| 161 | 4256959H1 | 2161 | 2426 |
| 161 | 6993692H1 | 2148 | 2573 |
| 161 | 534218H1 | 2156 | 2414 |
| 161 | 664384H1 | 2156 | 2421 |
| 161 | 4713170H1 | 2177 | 2420 |
| 161 | 663504H1 | 2219 | 2347 |
| 161 | 2247226H1 | 2184 | 2445 |
| 161 | 2245218H1 | 2184 | 2452 |
| 161 | 531779H1 | 2184 | 2426 |
| 161 | 2042975H1 | 2184 | 2450 |
| 161 | 6741472H1 | 2204 | 2750 |
| 161 | 4490622H1 | 2204 | 2747 |
| 161 | 4063891H1 | 2241 | 2390 |
| 161 | 5960583H1 | 2242 | 2800 |
| 161 | 3781135H1 | 2190 | 2495 |
| 161 | 7071563H1 | 2208 | 2569 |
| 161 | 6891449J1 | 2214 | 2315 |
| 161 | 554022H1 | 2202 | 2438 |
| 161 | 4532533H1 | 2273 | 2435 |
| 161 | 6739828H1 | 2219 | 2805 |
| 161 | 4691246H1 | 2208 | 2424 |
| 161 | 3470773H1 | 2209 | 2454 |
| 161 | 5967249H1 | 2224 | 2744 |
| 161 | 6765073J1 | 2275 | 2692 |
| 161 | 666644H1 | 2212 | 2384 |
| 161 | 5579450H1 | 2212 | 2365 |
| 161 | 1618034H1 | 2212 | 2418 |
| 161 | 7088449H1 | 1 | 552 |
| 161 | 7073146H1 | 170 | 726 |
| 161 | 6784888H1 | 439 | 960 |
| 161 | 6882093H1 | 479 | 990 |
| 161 | 6882161H1 | 479 | 992 |
| 161 | 6766193H1 | 480 | 961 |
| 161 | 6977268H1 | 504 | 925 |
| 161 | 7230035H1 | 585 | 1180 |
| 161 | 7075220H1 | 629 | 1180 |
| 161 | 1485846F6 | 646 | 910 |
| 161 | g1975476 | 664 | 884 |
| 161 | 1486578H1 | 676 | 912 |
| 161 | 5968971H1 | 685 | 1143 |
| 161 | 1476202H1 | 762 | 924 |
| 161 | 865333H1 | 780 | 910 |
| 161 | 7193726H2 | 786 | 1230 |
| 161 | 6891594J1 | 877 | 1507 |
| 161 | 4031012H1 | 981 | 1202 |
| 161 | 6446990H1 | 988 | 1498 |
| 161 | g6133077 | 1024 | 1478 |
| 161 | 3941692H1 | 1056 | 1337 |
| 161 | 4772703H1 | 1105 | 1361 |
| 161 | g668477 | 1117 | 1416 |
| 161 | g870488 | 1118 | 1438 |
| 161 | g698735 | 1117 | 1456 |
| 161 | g669863 | 1117 | 1378 |
| 161 | g768138 | 1143 | 1468 |
| 161 | g1062711 | 1172 | 1485 |
| 161 | g875401 | 1174 | 1475 |
| 161 | 1617044H1 | 1178 | 1392 |
| 161 | 5781411H1 | 1182 | 1459 |
| 161 | 532473H1 | 1193 | 1433 |
| 161 | 3945042H1 | 1194 | 1480 |
| 161 | 4758039H1 | 1193 | 1440 |
| 161 | 3466710H1 | 1203 | 1464 |
| 161 | 5860513H1 | 1221 | 1490 |
| 161 | 6770719H1 | 1238 | 1355 |
| 161 | 5656957H1 | 1238 | 1487 |
| 161 | 5204013H1 | 1238 | 1505 |
| 161 | 4254309H1 | 1257 | 1459 |
| 161 | 5578708H1 | 1259 | 1489 |
| 161 | 5013751H1 | 1264 | 1491 |
| 161 | 4019484H1 | 1278 | 1543 |
| 161 | 6063870H1 | 1281 | 1564 |
| 161 | 3471004H1 | 1298 | 1570 |
| 161 | 5206590H1 | 1304 | 1546 |
| 161 | 6746950H1 | 1304 | 1831 |
| 161 | 5857309H1 | 1303 | 1576 |
| 161 | 5968610H1 | 1308 | 1851 |
| 161 | g2012398 | 1308 | 1663 |
| 161 | 3469688H1 | 1317 | 1580 |
| 161 | 5857943H1 | 1354 | 1638 |
| 161 | 7070664H1 | 1508 | 1855 |
| 161 | 6416952H1 | 1519 | 1822 |
| 161 | 6894069H1 | 1526 | 2069 |
| 161 | 5013816H1 | 1533 | 1783 |
| 161 | 533363H1 | 1538 | 1775 |
| 161 | 4761822H1 | 1540 | 1812 |
| 161 | 2904083H1 | 1554 | 1850 |
| 161 | 4306790H1 | 1577 | 1687 |
| 161 | 1991775H1 | 1578 | 1797 |
| 161 | 4337965H1 | 1580 | 1827 |
| 161 | 5833237H1 | 1585 | 1750 |
| 161 | 3469095H1 | 1597 | 1855 |
| 161 | 4316943H1 | 1635 | 1803 |
| 161 | 5876761H1 | 1647 | 1931 |
| 161 | 5015603H1 | 1648 | 1813 |
| 161 | 2963466H1 | 1724 | 2028 |
| 161 | 4316745H1 | 1724 | 2020 |
| 161 | 4315891H1 | 1744 | 2022 |
| 161 | 4091142H1 | 1749 | 2023 |
| 161 | 4753020H1 | 1751 | 2007 |
| 161 | 6518022H1 | 1757 | 1838 |
| 161 | 4316639H1 | 1772 | 2046 |
| 161 | 2705655H1 | 1800 | 2083 |
| 161 | 5961924H1 | 1790 | 2298 |
| 161 | 4695643H1 | 1820 | 2036 |
| 161 | 2707689H1 | 1896 | 2192 |
| 161 | 4342587H1 | 1979 | 2088 |
| 161 | 6770516H1 | 1988 | 2569 |
| 161 | 4342620H1 | 1992 | 2246 |
| 161 | 6882093J1 | 1996 | 2568 |
| 161 | 6886296J1 | 2001 | 2481 |
| 161 | 7253724H1 | 2024 | 2531 |
| 161 | 2423349H1 | 2027 | 2272 |
| 161 | 4316734H1 | 2032 | 2342 |
| 161 | 4256579H1 | 2036 | 2265 |
| 161 | 6763709H1 | 2023 | 2568 |
| 161 | 6771870J1 | 2031 | 2578 |
| 161 | 4772777H1 | 2046 | 2149 |
| 161 | 6740527H1 | 2041 | 2522 |
| 161 | 4691683H1 | 2058 | 2293 |
| 161 | 5205527H1 | 2058 | 2293 |
| 161 | 5575884H1 | 2060 | 2251 |
| 161 | 3466389H1 | 2061 | 2306 |
| 161 | 5955966H1 | 2315 | 2492 |
| 161 | 5205250H2 | 2316 | 2479 |
| 161 | 4776444H1 | 2311 | 2566 |
| 161 | 6517485H1 | 2347 | 2825 |
| 161 | 2292420H1 | 2408 | 2647 |
| 161 | 6552809H1 | 2494 | 2887 |
| 161 | 6552988H1 | 2494 | 2887 |
| 161 | 6552963H1 | 2494 | 2887 |
| 161 | 4619412H1 | 2571 | 2791 |
| 161 | 4775811H1 | 2566 | 2801 |
| 161 | g1194667 | 2595 | 2887 |
| 161 | 5405506H1 | 2604 | 2840 |
| 161 | 4314575H1 | 2614 | 2895 |
| 161 | 1289406H1 | 2619 | 2877 |
| 161 | g1190424 | 2629 | 2887 |
| 161 | g1071637 | 2650 | 2858 |
| 161 | 4773458H1 | 2681 | 2887 |
| 161 | 4756793H1 | 2681 | 2826 |
| 161 | 4341024H1 | 2694 | 2874 |
| 161 | 4298642H1 | 2694 | 2887 |
| 161 | 1596024H1 | 2694 | 2887 |
| 161 | 552947H1 | 2699 | 2887 |
| 161 | 5371715H1 | 2713 | 2886 |
| 161 | 5447990H2 | 2737 | 2906 |
| 161 | 667160H1 | 2739 | 2887 |
| 162 | 668331H1 | 2789 | 2883 |
| 161 | 5657894H1 | 2793 | 2887 |
| 162 | 6127609T8 | 1 | 306 |
| 162 | 6959915H1 | 108 | 561 |
| 163 | 5914133H1 | 1 | 282 |
| 163 | 5914133F6 | 1 | 630 |
| 163 | 5321108F9 | 1 | 537 |
| 163 | 5914133F8 | 1 | 391 |
| 163 | 5914133T6 | 52 | 609 |
| 164 | 5911540F8 | 1 | 460 |
| 164 | 5911540H1 | 1 | 250 |
| 164 | 5911540T8 | 78 | 570 |
| 165 | 5905252F8 | 1 | 497 |
| 165 | 5905252F6 | 35 | 576 |
| 165 | 5905252H1 | 35 | 313 |
| 165 | 5905252T6 | 376 | 821 |
| 166 | 4020439F8 | 1 | 391 |
| 166 | 2773907F6 | 1 | 173 |
| 166 | 2773907H1 | 1 | 146 |
| 166 | 4020439H1 | 1 | 115 |
| 166 | 4020439T8 | 6 | 503 |
| 166 | 2773907T6 | 129 | 435 |
| 166 | g820143 | 313 | 435 |
| 167 | 6919815H1 | 1 | 89 |
| 167 | 6100456H1 | 12 | 272 |
| 167 | 5840353H1 | 19 | 294 |
| 167 | 3055393H1 | 1 | 77 |
| 167 | 4528621H1 | 3 | 250 |
| 167 | 482608H1 | 28 | 255 |
| 167 | 3477717H1 | 3 | 119 |
| 167 | 2472906H1 | 3 | 240 |
| 167 | 2444808H1 | 4 | 234 |
| 167 | 3167552H1 | 6 | 74 |
| 167 | 2615139H1 | 9 | 226 |
| 167 | 3199504H1 | 13 | 106 |
| 167 | 2455307H1 | 10 | 197 |
| 167 | 2428111H1 | 11 | 248 |
| 167 | 3458104H1 | 12 | 270 |
| 167 | 3596416H1 | 12 | 327 |
| 167 | 2453021H1 | 12 | 213 |
| 167 | 4298232H1 | 12 | 271 |
| 167 | g1956274 | 35 | 272 |
| 167 | g1880655 | 12 | 256 |
| 167 | 3458004H1 | 12 | 279 |
| 167 | 5694361H1 | 12 | 286 |
| 167 | g2026069 | 15 | 306 |
| 167 | 477069H1 | 15 | 278 |
| 167 | 1918196H1 | 15 | 293 |
| 167 | 5587272H1 | 18 | 282 |
| 167 | 4997069H1 | 18 | 284 |
| 167 | 1551008H1 | 18 | 211 |
| 167 | 5347226H1 | 19 | 275 |
| 167 | 6819761H1 | 19 | 616 |
| 167 | 5117110H1 | 20 | 289 |
| 167 | 3447366H2 | 19 | 275 |
| 167 | 2445594H1 | 19 | 249 |
| 167 | 4622780H1 | 19 | 288 |
| 167 | 2111981H1 | 20 | 282 |
| 167 | 552401H1 | 20 | 258 |
| 167 | 2461616H1 | 19 | 197 |
| 167 | 5379341H1 | 19 | 275 |
| 167 | 3820792H1 | 20 | 310 |
| 167 | 4347282H1 | 21 | 264 |
| 167 | 1322148H1 | 22 | 257 |
| 167 | 4222393H1 | 23 | 304 |
| 167 | 4223817H1 | 22 | 336 |
| 167 | 5843163H1 | 20 | 289 |
| 167 | 3657588H1 | 23 | 218 |
| 167 | 4721051H1 | 25 | 271 |
| 167 | 4790883H1 | 21 | 278 |
| 167 | 5377733H1 | 24 | 280 |
| 167 | g1638522 | 24 | 353 |
| 167 | 3596245H1 | 25 | 318 |
| 167 | 781633H1 | 25 | 270 |
| 167 | 5374490H1 | 26 | 286 |
| 167 | 2161371H1 | 31 | 277 |
| 167 | 3597248H1 | 32 | 267 |
| 167 | 2934534H1 | 36 | 172 |
| 167 | 4386768H1 | 37 | 326 |
| 167 | 3399780H1 | 126 | 191 |
| 167 | 6399947H1 | 126 | 272 |
| 167 | 6897251H1 | 166 | 634 |
| 167 | 4431669H2 | 173 | 312 |
| 167 | g1779781 | 330 | 692 |
| 167 | g826488 | 330 | 717 |
| 167 | 4794163H1 | 346 | 595 |
| 167 | 4880181H1 | 349 | 609 |
| 167 | g889083 | 366 | 638 |
| 167 | 6819761J1 | 396 | 1013 |
| 167 | g916666 | 408 | 513 |
| 167 | 4249123H1 | 452 | 539 |
| 167 | 6481276H1 | 584 | 800 |
| 167 | 4191747H1 | 624 | 709 |
| 167 | 638004H1 | 648 | 753 |
| 167 | 1452178H1 | 676 | 753 |
| 167 | g2615681 | 692 | 753 |
| 167 | g1665347 | 697 | 753 |
| 167 | g2558364 | 697 | 753 |
| 168 | 6795278H1 | 184 | 698 |
| 168 | 6796542H1 | 1 | 546 |
| 168 | 6796380H1 | 8 | 563 |
| 168 | 6795463H1 | 8 | 523 |
| 168 | 3941984H1 | 26 | 315 |
| 168 | g1260435 | 112 | 287 |
| 168 | 6798249H1 | 184 | 635 |
| 168 | 6791366H1 | 238 | 804 |
| 168 | 6790685H1 | 239 | 699 |
| 168 | 1242854H1 | 698 | 885 |
| 169 | 2904954T6 | 1 | 522 |
| 169 | 4739603H1 | 11 | 303 |
| 169 | 5614905H1 | 213 | 492 |
| 169 | g2006850 | 277 | 557 |
| 169 | 2008385H1 | 464 | 562 |
| 169 | 2014576T6 | 464 | 523 |
| 169 | 2014576H1 | 464 | 586 |
| 169 | 3294227T6 | 223 | 557 |
| 169 | 2014576R6 | 464 | 553 |
| 169 | 1716729H1 | 501 | 556 |
| 170 | 3966795F6 | 1 | 365 |
| 170 | 3966795H1 | 1 | 267 |
| 170 | 3274864H1 | 14 | 268 |
| 170 | 3966795T6 | 23 | 659 |
| 171 | 3033193F6 | 1 | 272 |
| 171 | 3033193H1 | 1 | 216 |
| 171 | 3033193T6 | 129 | 445 |
| 172 | 5908301F8 | 1 | 519 |
| 172 | 5908301H1 | 1 | 311 |
| 172 | 6271267H2 | 24 | 492 |
| 172 | 5908301T9 | 248 | 586 |
| 173 | 5907939T9 | 1 | 517 |
| 173 | 5907939F8 | 1 | 551 |
| 173 | 5907939H1 | 1 | 310 |
| 173 | 6271008H2 | 10 | 483 |
| 174 | 5912415F8 | 1 | 376 |
| 174 | 5912415H1 | 1 | 299 |
| 174 | 5912415F6 | 12 | 565 |
| 174 | 5912415T9 | 66 | 535 |
| 175 | 4119207F6 | 1 | 336 |
| 175 | 4119207T6 | 1 | 336 |
| 175 | 4119207H1 | 1 | 175 |
| 176 | 5905477F6 | 1 | 564 |
| 176 | 5905477H1 | 1 | 271 |
| 176 | 5905477T9 | 411 | 932 |
| 177 | 5907791F8 | 1 | 360 |
| 177 | 5907791H1 | 1 | 280 |
| 177 | 5907791F6 | 1 | 305 |
| 177 | 5907791T9 | 155 | 682 |
| 177 | 5907791T6 | 248 | 733 |
| 178 | 4770137H1 | 1 | 144 |
| 178 | 5564253H1 | 2 | 235 |
| 178 | 606101H1 | 1 | 169 |
| 178 | 4650476H1 | 1 | 271 |
| 178 | 592893H1 | 2 | 130 |
| 178 | 781453H1 | 17 | 276 |
| 178 | 2793564H1 | 28 | 317 |
| 178 | 888943H1 | 151 | 287 |
| 178 | 6589872H1 | 194 | 698 |
| 178 | 2190828T6 | 207 | 699 |
| 178 | 1503654H1 | 225 | 491 |
| 178 | 4200384H1 | 388 | 662 |
| 179 | 5911540F8 | 1 | 460 |
| 179 | 5911540H1 | 1 | 250 |
| 179 | 5911540T9 | 27 | 568 |
| 179 | 5911540T8 | 78 | 569 |
| 180 | g4325750 | 1 | 103 |
| 180 | 4290049F6 | 1 | 353 |
| 180 | 4290049H1 | 1 | 124 |
| 180 | 5493752H1 | 172 | 444 |
| 181 | 6729842H1 | 1 | 412 |
| 181 | 5401350H1 | 1 | 105 |
| 181 | 6057617H1 | 56 | 643 |
| 181 | 5401350T9 | 82 | 666 |
| 181 | g3214092 | 406 | 782 |
| 181 | 3524102H1 | 479 | 779 |
| 182 | 7030475H1 | 1 | 524 |
| 182 | 7030327H1 | 3 | 376 |
| 183 | 5271230H1 | 1485 | 1748 |
| 183 | 240641H1 | 1485 | 1657 |
| 183 | 2948213H1 | 1486 | 1768 |
| 183 | g1291432 | 1492 | 1896 |
| 183 | 353018H1 | 1496 | 1708 |
| 183 | 349497H1 | 1496 | 1680 |
| 183 | g2276981 | 1533 | 1859 |
| 183 | 6804414J1 | 1537 | 2080 |
| 183 | 3499213H1 | 1537 | 1841 |
| 183 | g2537462 | 1542 | 1981 |
| 183 | 1551014H1 | 1549 | 1763 |
| 183 | 808076H1 | 1554 | 1769 |
| 183 | 2307944H1 | 1557 | 1762 |
| 183 | g2222952 | 1559 | 1851 |
| 183 | 2804178H1 | 1565 | 1852 |
| 183 | 6801505J1 | 1566 | 1881 |
| 183 | g888315 | 1569 | 1927 |
| 183 | g2056786 | 1570 | 2035 |
| 183 | 6901949H1 | 1 | 518 |
| 183 | 4183549H1 | 91 | 259 |
| 183 | 6980581H1 | 104 | 452 |
| 183 | 5839778H1 | 107 | 359 |
| 183 | 808102H1 | 172 | 406 |
| 183 | 4323252H1 | 224 | 469 |
| 183 | g2003585 | 258 | 517 |
| 183 | g900863 | 361 | 447 |
| 183 | 6979927H1 | 437 | 785 |
| 183 | 582110H1 | 487 | 739 |
| 183 | 3323870H1 | 499 | 778 |
| 183 | 2115479R6 | 515 | 913 |
| 183 | 4779981H1 | 538 | 793 |
| 183 | 1818066H1 | 552 | 808 |
| 183 | 1818066F6 | 552 | 893 |
| 183 | g4438745 | 584 | 797 |
| 183 | 5450643H1 | 614 | 851 |
| 183 | 7066292H1 | 636 | 1078 |
| 183 | 3538459H1 | 648 | 855 |
| 183 | 2115479H1 | 655 | 913 |
| 183 | 4090518H1 | 669 | 864 |
| 183 | 6077621H1 | 686 | 797 |
| 183 | 4947628H1 | 702 | 832 |
| 183 | 4759655H1 | 713 | 993 |
| 183 | 1699317H1 | 715 | 931 |
| 183 | 4303659H1 | 740 | 991 |
| 183 | 591324R6 | 752 | 1180 |
| 183 | 591324H1 | 752 | 975 |
| 183 | 591174H1 | 752 | 955 |
| 183 | 5998787H1 | 772 | 1179 |
| 183 | 1672160H1 | 778 | 991 |
| 183 | 1672152H1 | 778 | 991 |
| 183 | 4694794H1 | 784 | 1045 |
| 183 | 2972664H2 | 782 | 1078 |
| 183 | 1718469H1 | 795 | 1006 |
| 183 | 1718480H1 | 795 | 998 |
| 183 | 3270027H1 | 802 | 1059 |
| 183 | 927251R1 | 806 | 1419 |
| 183 | 927251H1 | 806 | 1058 |
| 183 | g1986696 | 809 | 992 |
| 183 | 5102583H1 | 821 | 1068 |
| 183 | 7094153H1 | 822 | 1103 |
| 183 | 5948962H1 | 843 | 1137 |
| 183 | 1571253H1 | 845 | 1013 |
| 183 | 5371617H1 | 860 | 1101 |
| 183 | 3784982H1 | 895 | 1195 |
| 183 | 6980693H1 | 897 | 1257 |
| 183 | 4770011H1 | 901 | 1166 |
| 183 | 1695218H1 | 903 | 1119 |
| 183 | 3697260H1 | 962 | 1179 |
| 183 | 1331860H1 | 981 | 1179 |
| 183 | g1644929 | 1018 | 1179 |
| 183 | g1880762 | 1046 | 1163 |
| 183 | 6804414H1 | 1065 | 1601 |
| 183 | 1722938H1 | 1074 | 1327 |
| 183 | 5451478H1 | 1104 | 1348 |
| 183 | 1500938H1 | 1108 | 1304 |
| 183 | 5950551H1 | 1120 | 1413 |
| 183 | 3376840H1 | 1121 | 1367 |
| 183 | 5950519H1 | 1121 | 1320 |
| 183 | 4193013H1 | 1121 | 1438 |
| 183 | 4556920H1 | 1124 | 1261 |
| 183 | g1046489 | 1143 | 1470 |
| 183 | g1046497 | 1143 | 1455 |
| 183 | 1283213H1 | 1202 | 1390 |
| 183 | 1283213F6 | 1202 | 1658 |
| 183 | 4225341H1 | 1206 | 1487 |
| 183 | 6714888H1 | 1214 | 1778 |
| 183 | 1346996H1 | 1259 | 1485 |
| 183 | 1348304H1 | 1259 | 1481 |
| 183 | 1348303H1 | 1259 | 1481 |
| 183 | 6954001H1 | 1261 | 1764 |
| 183 | g2107139 | 1290 | 1761 |
| 183 | 4720048H1 | 1308 | 1583 |
| 183 | 1720725H1 | 1328 | 1538 |
| 183 | 1722139H1 | 1328 | 1553 |
| 183 | 5970873H1 | 1334 | 1887 |
| 183 | 4693221H1 | 1344 | 1601 |
| 183 | 2571078H1 | 1343 | 1591 |
| 183 | 6121921H1 | 1351 | 1904 |
| 183 | 4215895H1 | 1363 | 1625 |
| 183 | g2188904 | 1372 | 1857 |
| 183 | g1646485 | 1374 | 1468 |
| 183 | 004844H1 | 1386 | 1669 |
| 183 | 6313521H1 | 1386 | 1950 |
| 183 | 2427675H1 | 1392 | 1622 |
| 183 | 5478565H1 | 1401 | 1608 |
| 183 | 5480821H1 | 1402 | 1635 |
| 183 | 5483319H1 | 1402 | 1501 |
| 183 | 5322481H1 | 1403 | 1641 |
| 183 | 5948083H1 | 1409 | 1714 |
| 183 | 1996549H1 | 1415 | 1554 |
| 183 | 1996549R6 | 1415 | 1751 |
| 183 | 5405753H1 | 1434 | 1586 |
| 183 | 5293687H2 | 1434 | 1680 |
| 183 | 935623R1 | 1465 | 1989 |
| 183 | 936611H1 | 1465 | 1767 |
| 183 | 935623H1 | 1465 | 1708 |
| 183 | 3409340H1 | 1473 | 1629 |
| 183 | 1819126H1 | 1480 | 1748 |
| 183 | 1819126F6 | 1480 | 1979 |
| 183 | g2053565 | 1480 | 1888 |
| 183 | g2209615 | 1481 | 1929 |
| 183 | 5879274H1 | 1482 | 1754 |
| 183 | 4570795H1 | 2032 | 2292 |
| 183 | g1046490 | 2044 | 2349 |
| 183 | 1416514H1 | 2046 | 2291 |
| 183 | 4193606H1 | 2048 | 2324 |
| 183 | g1858344 | 2051 | 2338 |
| 183 | 5021880T1 | 2055 | 2300 |
| 183 | 1281333H1 | 2058 | 2294 |
| 183 | 2222539H1 | 2060 | 2298 |
| 183 | 2222539F6 | 2060 | 2338 |
| 183 | 2222539T6 | 2061 | 2300 |
| 183 | 5341229H1 | 2066 | 2265 |
| 183 | 2659133H1 | 2067 | 2280 |
| 183 | g3871000 | 2069 | 2338 |
| 183 | g4524292 | 2077 | 2340 |
| 183 | g1858279 | 2081 | 2342 |
| 183 | 1301182H1 | 2082 | 2343 |
| 183 | 2256984H1 | 2105 | 2338 |
| 183 | 6498361H1 | 2106 | 2338 |
| 183 | 2574115H1 | 2106 | 2337 |
| 183 | 2273027H1 | 2107 | 2310 |
| 183 | g4899838 | 2119 | 2346 |
| 183 | g3051313 | 2128 | 2338 |
| 183 | 3142955H1 | 2158 | 2340 |
| 183 | 2878176H1 | 2164 | 2339 |
| 183 | 3271618H1 | 2181 | 2337 |
| 183 | g2958193 | 2190 | 2340 |
| 183 | 2247168H1 | 2197 | 2344 |
| 183 | 2246357H1 | 2225 | 2339 |
| 183 | 2247256H1 | 2254 | 2339 |
| 183 | 3812939H1 | 2274 | 2338 |
| 183 | 5103254H1 | 2283 | 2339 |
| 183 | 7064872H1 | 1575 | 2105 |
| 183 | 6818666H1 | 1579 | 1827 |
| 183 | 4726069H1 | 1581 | 1854 |
| 183 | g4662834 | 1586 | 2036 |
| 183 | g1182379 | 1589 | 1804 |
| 183 | g4874675 | 1588 | 2033 |
| 183 | 5661656H1 | 1589 | 1849 |
| 183 | 6868292H1 | 1591 | 2060 |
| 183 | 3706916H1 | 1605 | 1904 |
| 183 | g2208265 | 1633 | 2033 |
| 183 | 2424009H1 | 1649 | 1907 |
| 183 | 1470490H1 | 1663 | 1849 |
| 183 | 797359H1 | 1664 | 1903 |
| 183 | 3245252H1 | 1669 | 1936 |
| 183 | 4781187H1 | 1671 | 1939 |
| 183 | g1688385 | 1690 | 2024 |
| 183 | 1413737H1 | 1712 | 1978 |
| 183 | g2279273 | 1737 | 2033 |
| 183 | g1146486 | 1741 | 1926 |
| 183 | g1644873 | 1745 | 2038 |
| 183 | g888316 | 1749 | 2033 |
| 183 | 099594H1 | 1754 | 1972 |
| 183 | 3996904H1 | 1754 | 1913 |
| 183 | 3916961H1 | 1759 | 2048 |
| 183 | 3917411H1 | 1759 | 2036 |
| 183 | 6801505H1 | 1759 | 2125 |
| 183 | 910557H1 | 1785 | 1850 |
| 183 | 2921975H1 | 1788 | 2061 |
| 183 | 5003193H1 | 1790 | 2060 |
| 183 | g1442965 | 1791 | 2033 |
| 183 | 5018209H1 | 1797 | 1957 |
| 183 | 3246162H1 | 1797 | 2036 |
| 183 | 1344364H1 | 1798 | 2013 |
| 183 | 1344388H1 | 1798 | 2036 |
| 183 | 5928305H1 | 1801 | 2111 |
| 183 | 683816H1 | 1805 | 2040 |
| 183 | 5451469H1 | 1808 | 2048 |
| 183 | 2402750H1 | 1811 | 1919 |
| 183 | 1851976H1 | 1816 | 2034 |
| 183 | 3702341H1 | 1825 | 2066 |
| 183 | 2963989H1 | 1819 | 2096 |
| 183 | g1441785 | 1826 | 2091 |
| 183 | 5777701H1 | 1828 | 2105 |
| 183 | g3898324 | 1831 | 2042 |
| 183 | 1819126T6 | 1843 | 2298 |
| 183 | 1484988H1 | 1847 | 2095 |
| 183 | 2106229T6 | 1851 | 2298 |
| 183 | g4762523 | 1859 | 2033 |
| 183 | g4620507 | 1860 | 2039 |
| 183 | 1964264H1 | 1872 | 2033 |
| 183 | 1964264R6 | 1872 | 2040 |
| 183 | 1964264T6 | 1872 | 2002 |
| 183 | g2945963 | 1876 | 2340 |
| 183 | 4696529H1 | 1885 | 2095 |
| 183 | g4564438 | 1886 | 2339 |
| 183 | g3741810 | 1886 | 2341 |
| 183 | 2913361H1 | 1889 | 1977 |
| 183 | 6862628H1 | 1894 | 2033 |
| 183 | g3742173 | 1905 | 2340 |
| 183 | g4083420 | 1910 | 2338 |
| 183 | g3678703 | 1912 | 2342 |
| 183 | 6327536H1 | 1912 | 2340 |
| 183 | g2910125 | 1916 | 2341 |
| 183 | g3308355 | 1919 | 2342 |
| 183 | 2556534H1 | 1933 | 2178 |
| 183 | g3922126 | 1935 | 2338 |
| 183 | g4083267 | 1936 | 2338 |
| 183 | g4083582 | 1951 | 2338 |
| 183 | g1646486 | 1958 | 2340 |
| 183 | g2902884 | 1998 | 2339 |
| 183 | 953800T1 | 2000 | 2301 |
| 183 | g895530 | 2006 | 2338 |
| 183 | 953800H1 | 2012 | 2296 |
| 183 | 953800R1 | 2012 | 2338 |
| 183 | 4977128H1 | 2022 | 2281 |
| 183 | g1046498 | 2026 | 2338 |
| 184 | 3497339T6 | 1 | 492 |
| 184 | g1060678 | 211 | 436 |
| 184 | 6258709H1 | 213 | 444 |
| 184 | 2570554H1 | 239 | 484 |
| 184 | 2570554R6 | 239 | 634 |
| 184 | 6200064H1 | 459 | 921 |
| 184 | g734035 | 473 | 792 |
| 184 | 1400373F6 | 474 | 1007 |
| 184 | 1400373H1 | 474 | 733 |
| 184 | g2167556 | 488 | 897 |
| 184 | 6389638H1 | 542 | 823 |
| 184 | 6344656H1 | 598 | 885 |
| 184 | 6344688H1 | 606 | 888 |
| 184 | 6328470H1 | 664 | 1018 |
| 184 | g4148622 | 723 | 1072 |
| 184 | 6338470H1 | 793 | 1018 |
| 184 | 3784456H1 | 876 | 1200 |
| 184 | 3781165H1 | 943 | 1049 |
| 184 | g733951 | 1031 | 1403 |
| 184 | g734304 | 1149 | 1333 |
| 184 | 3554877H1 | 1 | 294 |
| 185 | 4111213H1 | 1 | 243 |
| 185 | 5624259R8 | 1 | 350 |
| 185 | 3139315H1 | 126 | 427 |
| 185 | 5545642H1 | 130 | 363 |
| 185 | 3141553H1 | 139 | 412 |
| 185 | g564381 | 139 | 369 |
| 185 | 987690H1 | 154 | 424 |
| 185 | 4833664H1 | 169 | 319 |
| 185 | 116132H1 | 214 | 403 |
| 185 | 3691576H1 | 244 | 399 |
| 185 | 1667502F6 | 265 | 644 |
| 185 | 3283023H1 | 267 | 528 |
| 185 | 3959293H2 | 290 | 564 |
| 185 | 2675859H1 | 347 | 596 |
| 185 | 2676108H1 | 347 | 594 |
| 185 | 2676122H1 | 347 | 591 |
| 185 | 5301231H1 | 387 | 569 |
| 185 | 1598950H1 | 387 | 567 |
| 185 | 2352332H1 | 456 | 626 |
| 185 | 5038795H1 | 459 | 689 |
| 185 | 2534205H1 | 459 | 705 |
| 185 | 3252993H1 | 464 | 711 |
| 185 | 1742040H1 | 490 | 721 |
| 185 | 4592168H1 | 498 | 648 |
| 185 | g29244 | 1 | 255 |
| 185 | 2635196H1 | 1 | 249 |
| 186 | 6428735H1 | 867 | 1184 |
| 187 | 2525961F6 | 1 | 449 |
| 187 | 2525961H1 | 2 | 243 |
| 187 | 6560586H1 | 64 | 613 |
| 187 | g1357976 | 235 | 523 |
| 187 | 2525961T6 | 253 | 677 |
| 187 | g3245391 | 532 | 894 |
| 188 | g1277774 | 1 | 322 |
| 188 | g2186366 | 1 | 442 |
| 188 | 5533987H1 | 1 | 268 |
| 188 | 5320656H1 | 23 | 287 |
| 188 | 985175H1 | 22 | 276 |
| 188 | 5478163H1 | 23 | 303 |
| 188 | 5476045H1 | 23 | 301 |
| 188 | 5325512H1 | 23 | 291 |
| 188 | 5479637H1 | 23 | 159 |
| 188 | 7289635H1 | 196 | 762 |
| 188 | 6559813H1 | 603 | 1192 |
| 188 | 6858544H1 | 732 | 1210 |
| 188 | 5929387H1 | 845 | 1124 |
| 188 | 5778630H1 | 845 | 1114 |
| 188 | 4017917H1 | 851 | 1115 |
| 188 | 5206602H1 | 905 | 1185 |
| 188 | 4776841H1 | 1078 | 1295 |
| 188 | 6314480H1 | 1093 | 1213 |
| 189 | 70395867D1 | 1 | 542 |
| 189 | 2525961F6 | 4 | 452 |
| 189 | 2525961H1 | 5 | 246 |
| 189 | 70395557D1 | 40 | 642 |
| 189 | 70397658D1 | 59 | 589 |
| 189 | 6560586H1 | 67 | 616 |
| 189 | 70396453D1 | 72 | 478 |
| 189 | 70396167D1 | 119 | 654 |
| 189 | 70396459D1 | 118 | 585 |
| 189 | 70396121D1 | 192 | 481 |
| 189 | g1357976 | 238 | 526 |
| 189 | 2525961T6 | 256 | 680 |
| 189 | 70396053D1 | 260 | 679 |
| 189 | 70396654D1 | 278 | 768 |
| 189 | 70395799D1 | 279 | 680 |
| 189 | 70395826D1 | 279 | 680 |
| 189 | 70397446D1 | 279 | 676 |
| 189 | 70397464D1 | 292 | 676 |
| 189 | 70394880D1 | 293 | 746 |
| 189 | 70397538D1 | 293 | 768 |
| 189 | 70396886D1 | 292 | 564 |
| 189 | 70395257D1 | 293 | 751 |
| 189 | 70395475D1 | 298 | 676 |
| 189 | 70395110D1 | 307 | 676 |
| 189 | 70395982D1 | 312 | 680 |
| 189 | 70397165D1 | 352 | 676 |
| 189 | 70396476D1 | 483 | 676 |
| 189 | g3245391 | 535 | 897 |
| 190 | 2402420H1 | 4083 | 4349 |
| 190 | 1340154H1 | 4091 | 4319 |
| 190 | 2791792R6 | 4108 | 4475 |
| 190 | 2079255T6 | 4053 | 4414 |
| 190 | g2884989 | 4111 | 4451 |
| 190 | g1189027 | 4060 | 4458 |
| 190 | 2412005H1 | 4120 | 4352 |
| 190 | g2354871 | 4123 | 4450 |
| 190 | g2350487 | 4133 | 4457 |
| 190 | g5662773 | 4156 | 4466 |
| 190 | g5639034 | 4061 | 4453 |
| 190 | g816766 | 4165 | 4460 |
| 190 | 3041690H1 | 4157 | 4451 |
| 190 | 977648R1 | 4063 | 4431 |
| 190 | g1193159 | 4182 | 4458 |
| 190 | 977648T1 | 4063 | 4415 |
| 190 | 977648H1 | 4063 | 4386 |
| 190 | 978306H1 | 4063 | 4319 |
| 190 | g2051455 | 4184 | 4460 |
| 190 | 5280171H1 | 4187 | 4442 |
| 190 | g3886427 | 4204 | 4347 |
| 190 | 1381539H1 | 4210 | 4457 |
| 190 | 552969H1 | 4210 | 4458 |
| 190 | 2760603H1 | 4210 | 4453 |
| 190 | g3647431 | 4212 | 4454 |
| 190 | 1917113H1 | 4245 | 4457 |
| 190 | 4787118H1 | 4063 | 4343 |
| 190 | g892648 | 4259 | 4458 |
| 190 | g2229339 | 4272 | 4456 |
| 190 | 1942308H1 | 4292 | 4461 |
| 190 | 1942315H1 | 4292 | 4461 |
| 190 | 1941519H1 | 4327 | 4457 |
| 190 | 5007945H1 | 4389 | 4457 |
| 190 | 1979718T6 | 4069 | 4419 |
| 190 | 240941H1 | 4066 | 4182 |
| 190 | 1979718R6 | 4069 | 4452 |
| 190 | 1979718H1 | 4069 | 4174 |
| 190 | g682911 | 4083 | 4457 |
| 190 | 4465894H1 | 3788 | 4048 |
| 190 | 2819748T6 | 3815 | 4417 |
| 190 | 3445036H1 | 3816 | 4085 |
| 190 | 6735779H1 | 3822 | 4433 |
| 190 | 2279717T6 | 3824 | 4418 |
| 190 | 3720714H1 | 3832 | 4020 |
| 190 | 4828820H1 | 3844 | 4119 |
| 190 | 1369089H1 | 3847 | 4077 |
| 190 | 1833781H1 | 3850 | 4130 |
| 190 | 1965941T6 | 3865 | 4422 |
| 190 | 2559627H1 | 3868 | 3984 |
| 190 | 2285422H1 | 3881 | 4083 |
| 190 | 5483595H1 | 3904 | 4084 |
| 190 | 5322590H1 | 3904 | 4157 |
| 190 | g892647 | 3925 | 4226 |
| 190 | 4030718T6 | 3927 | 4433 |
| 190 | 6476518H1 | 3939 | 4460 |
| 190 | 5013604H1 | 3940 | 4221 |
| 190 | 2245864H1 | 3949 | 4223 |
| 190 | 2301055T6 | 3955 | 4416 |
| 190 | 2292517T6 | 3967 | 4419 |
| 190 | g5444044 | 3982 | 4452 |
| 190 | g5436138 | 3984 | 4465 |
| 190 | g3427279 | 3990 | 4459 |
| 190 | 6612393H1 | 4008 | 4444 |
| 190 | g6044228 | 4017 | 4457 |
| 190 | g4650722 | 4020 | 4460 |
| 190 | g5109970 | 4020 | 4459 |
| 190 | g2656315 | 4021 | 4456 |
| 190 | g3277136 | 4026 | 4453 |
| 190 | 615565H1 | 4040 | 4314 |
| 190 | g1192291 | 4042 | 4126 |
| 190 | g4002109 | 4047 | 4457 |
| 190 | 933913R1 | 3411 | 3813 |
| 190 | 933913H1 | 3411 | 3683 |
| 190 | 3056157H1 | 3442 | 3663 |
| 190 | 6853558H1 | 3446 | 3911 |
| 190 | 1267149F1 | 3446 | 3913 |
| 190 | 1267149H1 | 3446 | 3659 |
| 190 | 1413302H1 | 3453 | 3663 |
| 190 | 4092170H1 | 3473 | 3749 |
| 190 | 1961533H1 | 3491 | 3760 |
| 190 | 1961533R6 | 3491 | 3663 |
| 190 | 464481H1 | 3491 | 3663 |
| 190 | g2141846 | 3498 | 3817 |
| 190 | 1373705H1 | 3514 | 3748 |
| 190 | 3961925H1 | 3584 | 3641 |
| 190 | 5285788H1 | 3610 | 3739 |
| 190 | 2301055R6 | 3663 | 3918 |
| 190 | 1965941R6 | 3692 | 4177 |
| 190 | 3991277H1 | 3692 | 3981 |
| 190 | 1923669H1 | 3692 | 3923 |
| 190 | 2301055H1 | 3692 | 3919 |
| 190 | 1965941H1 | 3692 | 3916 |
| 190 | 1833543H1 | 3692 | 3890 |
| 190 | 927374H1 | 3696 | 3966 |
| 190 | 4511590H1 | 3696 | 3931 |
| 190 | 6517421H1 | 3703 | 4233 |
| 190 | 1551235T6 | 3716 | 4417 |
| 190 | 2674692H1 | 3731 | 3965 |
| 190 | 2288745H1 | 3734 | 3969 |
| 190 | 4311971H1 | 3740 | 4037 |
| 190 | 6118751H1 | 3753 | 4264 |
| 190 | 6119992H1 | 3753 | 4329 |
| 190 | 6126908H1 | 3753 | 4255 |
| 190 | g4629955 | 3755 | 3976 |
| 190 | 2157206H1 | 3772 | 4029 |
| 190 | 71226132V1 | 2110 | 2748 |
| 190 | g3092783 | 2129 | 2371 |
| 190 | 70863741V1 | 2130 | 2716 |
| 190 | 2079255F6 | 2130 | 2513 |
| 190 | 2079255H1 | 2130 | 2367 |
| 190 | 6167128H1 | 2173 | 2701 |
| 190 | 70856205V1 | 2176 | 2782 |
| 190 | 6482958H1 | 2180 | 2277 |
| 190 | 70149143V1 | 2191 | 2726 |
| 190 | 5372491H1 | 2218 | 2355 |
| 190 | 71226268V1 | 2225 | 2707 |
| 190 | g5234288 | 2245 | 2718 |
| 190 | g389953 | 2249 | 2637 |
| 190 | g769298 | 2249 | 2567 |
| 190 | 579131H1 | 2257 | 2504 |
| 190 | 579198H1 | 2257 | 2503 |
| 190 | g3308511 | 2277 | 2721 |
| 190 | 083837H1 | 2276 | 2489 |
| 190 | g4534587 | 2287 | 2674 |
| 190 | g4188225 | 2296 | 2712 |
| 190 | 3380281H1 | 2315 | 2563 |
| 190 | g3870352 | 2316 | 2713 |
| 190 | 3086136H1 | 2326 | 2531 |
| 190 | g3228885 | 2328 | 2714 |
| 190 | g2541163 | 2344 | 2721 |
| 190 | g3884137 | 2348 | 2721 |
| 190 | 1819282F6 | 2363 | 2713 |
| 190 | 1819282H1 | 2363 | 2618 |
| 190 | 6492522H1 | 2369 | 2978 |
| 190 | g875856 | 2373 | 2721 |
| 190 | 4176829H1 | 2371 | 2638 |
| 190 | 4176860H1 | 2371 | 2634 |
| 190 | 70864219V1 | 2391 | 2984 |
| 190 | 1819282T6 | 2405 | 2666 |
| 190 | g819854 | 2421 | 2722 |
| 190 | g561301 | 2418 | 2717 |
| 190 | 70145373V1 | 2426 | 2719 |
| 190 | 4670647H1 | 2442 | 2720 |
| 190 | 70855556V1 | 2465 | 3045 |
| 190 | 6844792H1 | 2498 | 2713 |
| 190 | 3724780H1 | 2530 | 2833 |
| 190 | 4822074H1 | 2542 | 2658 |
| 190 | g794631 | 2547 | 2721 |
| 190 | g708639 | 2550 | 2858 |
| 190 | 70146025V1 | 2559 | 3033 |
| 190 | g691143 | 2573 | 2932 |
| 190 | g3096354 | 2577 | 2716 |
| 190 | 70855455V1 | 2586 | 3160 |
| 190 | 4259987H1 | 2619 | 2702 |
| 190 | 6545104H1 | 2633 | 2713 |
| 190 | g874560 | 2650 | 2722 |
| 190 | 4612918H1 | 2655 | 2837 |
| 190 | 4144852H1 | 2661 | 2942 |
| 190 | 985756R1 | 2688 | 3124 |
| 190 | 985756H1 | 2688 | 2979 |
| 190 | 5570469H1 | 2726 | 2925 |
| 190 | 6323423H1 | 2731 | 2988 |
| 190 | 985756R6 | 2731 | 2808 |
| 190 | 6835880H1 | 2740 | 3320 |
| 190 | 6742687H1 | 2750 | 3268 |
| 190 | 5350646H1 | 2785 | 3035 |
| 190 | 71227966V1 | 2797 | 3000 |
| 190 | 3091359H1 | 2803 | 3085 |
| 190 | 985756T6 | 2829 | 3266 |
| 190 | g1198696 | 2825 | 3127 |
| 190 | g3416884 | 2871 | 3306 |
| 190 | 3695945H1 | 2881 | 3163 |
| 190 | 5377540H1 | 2893 | 3153 |
| 190 | g5363556 | 2895 | 3301 |
| 190 | g618368 | 2909 | 3252 |
| 190 | 1305496T6 | 2927 | 3263 |
| 190 | 1551235R6 | 2945 | 3460 |
| 190 | g530325 | 2945 | 3279 |
| 190 | 1551235H1 | 2945 | 3153 |
| 190 | 4311884H1 | 2976 | 3299 |
| 190 | 3659340H1 | 2985 | 3090 |
| 190 | 6125263H1 | 2989 | 3523 |
| 190 | 1984710H1 | 2986 | 3241 |
| 190 | 6124418H1 | 2989 | 3449 |
| 190 | 1008121H1 | 2998 | 3264 |
| 190 | 4402539H1 | 3002 | 3244 |
| 190 | 3518554H1 | 3018 | 3268 |
| 190 | 3345944H1 | 3032 | 3288 |
| 190 | 2819748F6 | 3075 | 3394 |
| 190 | 2819748H1 | 3077 | 3231 |
| 190 | 5660765H1 | 3096 | 3330 |
| 190 | 71225736V1 | 3132 | 3768 |
| 190 | 70857262V1 | 3133 | 3301 |
| 190 | 3785435H1 | 3154 | 3448 |
| 190 | 2279717H1 | 3183 | 3424 |
| 190 | 2279717R6 | 3183 | 3373 |
| 190 | 3469571H1 | 3207 | 3464 |
| 190 | 3356238H1 | 3209 | 3470 |
| 190 | 1805536H1 | 3212 | 3479 |
| 190 | 4160048H1 | 3214 | 3272 |
| 190 | 4942785H1 | 3234 | 3464 |
| 190 | 5585444H1 | 3235 | 3448 |
| 190 | 6269078H1 | 3252 | 3752 |
| 190 | 127072H1 | 3265 | 3456 |
| 190 | 7290084H1 | 3269 | 3683 |
| 190 | 7011256H1 | 3273 | 3657 |
| 190 | g1893973 | 3278 | 3669 |
| 190 | 3992283H1 | 3291 | 3405 |
| 190 | 3793161H1 | 3292 | 3493 |
| 190 | 3325588H1 | 3301 | 3515 |
| 190 | 1008331H1 | 3310 | 3628 |
| 190 | 2637310F6 | 3313 | 3559 |
| 190 | 2637310H1 | 3313 | 3583 |
| 190 | 4623479H1 | 3314 | 3577 |
| 190 | 3769624H1 | 3325 | 3624 |
| 190 | 3725948H1 | 3328 | 3615 |
| 190 | 3433892H1 | 3345 | 3591 |
| 190 | 3919666H1 | 3349 | 3447 |
| 190 | 5732787H1 | 3359 | 3579 |
| 190 | 3741626H1 | 3360 | 3641 |
| 190 | 5874821H1 | 3380 | 3628 |
| 190 | 2292517H1 | 3382 | 3639 |
| 190 | 3559065H1 | 3393 | 3574 |
| 190 | 3778532H1 | 3404 | 3653 |
| 190 | 6520495H1 | 3409 | 3864 |
| 190 | 5510632F6 | 1 | 402 |
| 190 | 5510632H1 | 1 | 201 |
| 190 | 6780915H1 | 41 | 512 |
| 190 | 4782751H1 | 127 | 371 |
| 190 | 4782751F6 | 127 | 187 |
| 190 | 2987413H1 | 192 | 477 |
| 190 | 6064208H1 | 203 | 464 |
| 190 | 5336504H1 | 219 | 435 |
| 190 | 5337416H1 | 219 | 473 |
| 190 | g1984325 | 271 | 504 |
| 190 | 7245264H1 | 286 | 854 |
| 190 | g3239921 | 293 | 648 |
| 190 | g2026718 | 299 | 586 |
| 190 | 7245164H1 | 302 | 823 |
| 190 | g2816869 | 320 | 565 |
| 190 | 5510632R6 | 364 | 855 |
| 190 | 4760384H1 | 491 | 575 |
| 190 | 4760384F6 | 491 | 961 |
| 190 | 1305496F6 | 798 | 1267 |
| 190 | 70145686V1 | 798 | 1046 |
| 190 | 1305496H1 | 798 | 941 |
| 190 | 3617505H1 | 819 | 1021 |
| 190 | 70861843V1 | 870 | 1297 |
| 190 | g669800 | 873 | 1196 |
| 190 | g875546 | 874 | 1129 |
| 190 | g874649 | 874 | 1176 |
| 190 | 70862573V1 | 891 | 1352 |
| 190 | 70856733V1 | 964 | 1627 |
| 190 | g771213 | 1008 | 1060 |
| 190 | 7048824H1 | 1036 | 1629 |
| 190 | 71225244V1 | 1056 | 1612 |
| 190 | 3211592H1 | 1054 | 1289 |
| 190 | 093259H1 | 1079 | 1319 |
| 190 | 926880H1 | 1120 | 1361 |
| 190 | 6163034H1 | 1127 | 1456 |
| 190 | 70860860V1 | 1134 | 1758 |
| 190 | 1366443R6 | 1134 | 1468 |
| 190 | 1366443H1 | 1134 | 1383 |
| 190 | 70145966V1 | 1141 | 1461 |
| 190 | 6448764H1 | 1151 | 1743 |
| 190 | 4960778H1 | 1157 | 1430 |
| 190 | 71226715V1 | 1203 | 1824 |
| 190 | 71228090V1 | 1215 | 1654 |
| 190 | 70857707V1 | 1220 | 1774 |
| 190 | 4625867H1 | 1221 | 1490 |
| 190 | 71225380V1 | 1274 | 1804 |
| 190 | 70858188V1 | 1290 | 1935 |
| 190 | 70858768V1 | 1303 | 1903 |
| 190 | 70864189V1 | 1307 | 1926 |
| 190 | 6911209H1 | 1323 | 1505 |
| 190 | 70858579V1 | 1330 | 1996 |
| 190 | 70858582V1 | 1366 | 2008 |
| 190 | 71224853V1 | 1396 | 1993 |
| 190 | 5640688H1 | 1416 | 1664 |
| 190 | 71226033V1 | 1421 | 2078 |
| 190 | 7359924H1 | 1437 | 2064 |
| 190 | 70861230V1 | 1450 | 2100 |
| 190 | 71226687V1 | 1457 | 2020 |
| 190 | 70864162V1 | 1463 | 2044 |
| 190 | 70855640V1 | 1491 | 2187 |
| 190 | 71225393V1 | 1507 | 2076 |
| 190 | 70858387V1 | 1539 | 2062 |
| 190 | 70855984V1 | 1520 | 1993 |
| 190 | 70857482V1 | 1520 | 2169 |
| 190 | 70855452V1 | 1526 | 2133 |
| 190 | 70861672V1 | 1541 | 2227 |
| 190 | 70861119V1 | 1548 | 2117 |
| 190 | 71225746V1 | 1558 | 2147 |
| 190 | 70856590V1 | 1568 | 2109 |
| 190 | 4030718F6 | 1573 | 1963 |
| 190 | 4030718H1 | 1573 | 1845 |
| 190 | 70856815V1 | 1611 | 2119 |
| 190 | 2742284H1 | 1626 | 1887 |
| 190 | 71228652V1 | 1651 | 2284 |
| 190 | 70855093V1 | 1689 | 2167 |
| 190 | 70863689V1 | 1722 | 2354 |
| 190 | 6412316H1 | 1730 | 1956 |
| 190 | 70857818V1 | 1740 | 2409 |
| 190 | 70860827V1 | 1745 | 2302 |
| 190 | 70864783V1 | 1755 | 2382 |
| 190 | 70863459V1 | 1752 | 2053 |
| 190 | 70858650V1 | 1822 | 2413 |
| 190 | 6911209J1 | 1830 | 2415 |
| 190 | 70146804V1 | 1869 | 2439 |
| 190 | 70146516V1 | 1869 | 2409 |
| 190 | 70863645V1 | 1877 | 2491 |
| 190 | 71225144V1 | 1889 | 2474 |
| 190 | 71224913V1 | 1929 | 2422 |
| 190 | 70146682V1 | 1936 | 2394 |
| 190 | 060994H1 | 1936 | 2131 |
| 190 | 70861917V1 | 1973 | 2563 |
| 190 | 2791792F6 | 2000 | 2315 |
| 190 | 2791792H1 | 2000 | 2297 |
| 190 | 70857602V1 | 2001 | 2402 |
| 190 | 71225364V1 | 2013 | 2660 |
| 190 | 70858585V1 | 2015 | 2639 |
| 190 | 70854964V1 | 2015 | 2644 |
| 190 | 70860984V1 | 2016 | 2573 |
| 190 | 70855603V1 | 2033 | 2704 |
| 190 | 70858486V1 | 2050 | 2280 |
| 190 | 70858723V1 | 2050 | 2280 |
| 190 | 70861733V1 | 2048 | 2785 |
| 190 | 70855437V1 | 2059 | 2683 |
| 190 | 70858374V1 | 2060 | 2596 |
| 190 | 449622H1 | 2069 | 2240 |
| 190 | 71228093V1 | 2070 | 2326 |
| 190 | 71227893V1 | 2070 | 2351 |
| 190 | 71227986V1 | 2072 | 2687 |
| 190 | 71225556V1 | 2086 | 2744 |
| 190 | 70864357V1 | 2095 | 2685 |
| 190 | 70855127V1 | 2110 | 2729 |
| 191 | 2106710R6 | 1204 | 1492 |
| 191 | 71032896V1 | 417 | 928 |
| 191 | 2004771H1 | 381 | 441 |
| 191 | 71134281V1 | 928 | 1489 |
| 191 | 71130579V1 | 1003 | 1490 |
| 191 | 71129556V1 | 1016 | 1488 |
| 191 | 71133640V1 | 1088 | 1509 |
| 191 | g3427925 | 591 | 1011 |
| 191 | 71133255V1 | 605 | 931 |
| 191 | 70643569V1 | 613 | 810 |
| 191 | 70639731V1 | 613 | 829 |
| 191 | 71133577V1 | 653 | 1365 |
| 191 | 71134103V1 | 657 | 1276 |
| 191 | 968289H1 | 143 | 416 |
| 191 | 7212584H1 | 176 | 467 |
| 191 | g4735242 | 212 | 473 |
| 191 | g4533052 | 255 | 473 |
| 191 | 2705278H1 | 1 | 210 |
| 191 | 2427258H1 | 8 | 163 |
| 191 | 991952H1 | 127 | 401 |
| 191 | 3070166H1 | 399 | 700 |
| 191 | 71131960V1 | 399 | 833 |
| 191 | 71130961V1 | 406 | 930 |
| 191 | 71133228V1 | 779 | 1472 |
| 191 | 2301872R6 | 503 | 813 |
| 191 | g1263124 | 505 | 671 |
| 191 | 1965957R6 | 512 | 843 |
| 191 | 6742448H1 | 398 | 474 |
| 191 | 6843692H1 | 413 | 692 |
| 191 | g3433649 | 563 | 1009 |
| 191 | 6883312H1 | 565 | 1039 |
| 191 | 70747238V1 | 585 | 712 |
| 191 | 1965957H1 | 512 | 685 |
| 191 | 2301872H1 | 512 | 686 |
| 191 | 6202014H1 | 534 | 931 |
| 191 | g4113683 | 562 | 1004 |
| 191 | 70749633V1 | 562 | 749 |
| 191 | 71129118V1 | 690 | 1233 |
| 191 | 5769401H1 | 682 | 1308 |
| 191 | g611097 | 808 | 1182 |
| 191 | 70641000V1 | 873 | 1297 |
| 191 | 2106710H1 | 1204 | 1488 |
| 191 | 2106710T6 | 1204 | 1448 |
| 191 | 861904H1 | 1343 | 1488 |
| 191 | 2709045F6 | 1441 | 1798 |
| 191 | 2709045H1 | 1442 | 1757 |
| 192 | 7345973H1 | 862 | 1457 |
| 192 | 7322101H1 | 921 | 1460 |
| 192 | 6850665H1 | 1366 | 1818 |
| 192 | 2654475F6 | 826 | 1310 |
| 192 | 2654475H1 | 826 | 1121 |
| 192 | g831331 | 1984 | 2353 |
| 192 | 1787542H1 | 2005 | 2223 |
| 192 | 6930205H1 | 2259 | 2725 |
| 192 | 4020229H1 | 1952 | 2228 |
| 192 | 6894957J1 | 1752 | 2259 |
| 192 | 4152694H1 | 1653 | 1911 |
| 192 | 3246645H1 | 1698 | 1866 |
| 192 | g4901556 | 1740 | 2205 |
| 192 | 2740754F6 | 2311 | 2784 |
| 192 | 2740754H1 | 2311 | 2564 |
| 192 | 1834220H1 | 2425 | 2687 |
| 192 | 4941620H1 | 2432 | 2695 |
| 192 | 4941983H1 | 2432 | 2711 |
| 192 | 2072075H1 | 2522 | 2772 |
| 192 | 5373319H1 | 2564 | 2779 |
| 192 | 3619907H1 | 2644 | 2921 |
| 192 | 4543335H1 | 2703 | 2966 |
| 192 | 6894957H1 | 2731 | 3286 |
| 192 | 4694271H1 | 2766 | 3009 |
| 192 | 4852731H1 | 2880 | 3138 |
| 192 | 2154473H1 | 2918 | 3190 |
| 192 | 2284114H1 | 2944 | 3172 |
| 192 | 4878579H1 | 2942 | 3086 |
| 192 | 4775770H1 | 2975 | 3235 |
| 192 | 2548439H1 | 3011 | 3245 |
| 192 | 2740754T6 | 3136 | 3642 |
| 192 | 7214289H1 | 3146 | 3371 |
| 192 | 3732858F6 | 3172 | 3639 |
| 192 | 3732858H1 | 3173 | 3398 |
| 192 | 4136158H1 | 3193 | 3478 |
| 192 | 2654475T6 | 3195 | 3653 |
| 192 | 3732858T6 | 3217 | 3639 |
| 192 | g4189007 | 3240 | 3680 |
| 192 | 856846H1 | 3327 | 3543 |
| 192 | g4076116 | 3329 | 3683 |
| 192 | g440877 | 1 | 3690 |
| 192 | g5544790 | 141 | 538 |
| 192 | 7106835H1 | 489 | 657 |
| 192 | 2313806H1 | 3487 | 3683 |
| 192 | 2841392H1 | 3499 | 3686 |
| 192 | 2097796H1 | 3545 | 3686 |
| 192 | 666777H1 | 3347 | 3550 |
| 192 | 815360H1 | 3387 | 3620 |
| 192 | 2104253H1 | 3439 | 3675 |
| 192 | g831278 | 3464 | 3690 |
| 193 | 5911845T6 | 1 | 432 |
| 193 | 5911845F8 | 1 | 588 |
| 193 | 5911845F6 | 1 | 484 |
| 193 | 5911845H1 | 1 | 254 |
| 193 | 5911845T8 | 22 | 443 |
| 194 | 5910555F8 | 1 | 587 |
| 194 | 5910555T8 | 85 | 489 |
| 194 | 5910555F6 | 1 | 640 |
| 194 | 5910555T6 | 1 | 575 |
| 194 | 5910555H1 | 1 | 194 |
| 195 | 6790675H1 | 1 | 380 |
| 195 | g1688992 | 67 | 154 |
| 195 | g4326739 | 68 | 512 |
| 196 | g274447 | 2556 | 2884 |
| 196 | g2051352 | 2558 | 2924 |
| 196 | g1859536 | 2558 | 2909 |
| 196 | g2817917 | 2567 | 2931 |
| 196 | g1783714 | 2570 | 2878 |
| 196 | g823824 | 2587 | 2923 |
| 196 | g2782889 | 2604 | 2887 |
| 196 | 4840554T6 | 2612 | 2903 |
| 196 | g565986 | 2639 | 2909 |
| 196 | g3277818 | 2645 | 2926 |
| 196 | g4149369 | 2649 | 2925 |
| 196 | 1575363H1 | 2664 | 2888 |
| 196 | 1575363F6 | 2664 | 2917 |
| 196 | 1575363T6 | 2666 | 2879 |
| 196 | g788188 | 2690 | 2909 |
| 196 | g1482370 | 2691 | 2910 |
| 196 | g864606 | 2696 | 2879 |
| 196 | 2006905H1 | 2712 | 2899 |
| 196 | 806183H1 | 2716 | 2867 |
| 196 | g842117 | 2730 | 2907 |
| 196 | g3742246 | 2738 | 2909 |
| 196 | 4882821H1 | 2771 | 3047 |
| 196 | 4884359H1 | 2771 | 3033 |
| 196 | 5090054H1 | 2781 | 3025 |
| 196 | 2277831T6 | 2784 | 2878 |
| 196 | 2343515H1 | 2792 | 2906 |
| 196 | 2343515F6 | 2792 | 2906 |
| 196 | g788214 | 2821 | 2899 |
| 196 | g1995403 | 2857 | 3182 |
| 196 | 5119623H1 | 2995 | 3277 |
| 196 | 3369954H1 | 3012 | 3294 |
| 196 | 5346406H1 | 3028 | 3177 |
| 196 | 2675533H1 | 3208 | 3394 |
| 196 | 3077845H1 | 3217 | 3451 |
| 196 | 5592052H1 | 3236 | 3495 |
| 196 | 996009H1 | 3251 | 3493 |
| 196 | 5041507H1 | 3296 | 3548 |
| 196 | 7032868H1 | 3301 | 3854 |
| 196 | 1665916H1 | 3358 | 3611 |
| 196 | 1665916F6 | 3358 | 3807 |
| 196 | 5513048H1 | 3393 | 3621 |
| 196 | 2969909H2 | 3439 | 3736 |
| 196 | 3978484H1 | 3473 | 3755 |
| 196 | g831015 | 3530 | 3895 |
| 196 | g821280 | 3561 | 3895 |
| 196 | g1885508 | 1 | 289 |
| 196 | g1110043 | 1 | 305 |
| 196 | 3349547F6 | 1 | 411 |
| 196 | 3349547H1 | 1 | 271 |
| 196 | 2741917H1 | 5 | 251 |
| 196 | 6991627H1 | 203 | 727 |
| 196 | 1434004H1 | 241 | 528 |
| 196 | 5587446H1 | 272 | 506 |
| 196 | g2880882 | 276 | 409 |
| 196 | 349280H1 | 375 | 614 |
| 196 | g713456 | 380 | 729 |
| 196 | g698683 | 403 | 727 |
| 196 | 6916554H1 | 603 | 1106 |
| 196 | 6719552H1 | 659 | 1266 |
| 196 | 4384945H1 | 704 | 965 |
| 196 | 4384979H1 | 704 | 882 |
| 196 | g1885551 | 910 | 1284 |
| 196 | 5019503H1 | 953 | 1210 |
| 196 | 4876805H1 | 996 | 1272 |
| 196 | 2479328H1 | 1055 | 1293 |
| 196 | 037774H1 | 1083 | 1306 |
| 196 | g1717439 | 1121 | 1557 |
| 196 | 4840554H1 | 1189 | 1453 |
| 196 | 4840554F6 | 1189 | 1633 |
| 196 | 3279387H1 | 1202 | 1456 |
| 196 | 5373713H1 | 1216 | 1468 |
| 196 | 4145650H1 | 1246 | 1331 |
| 196 | 4916687H1 | 1293 | 1450 |
| 196 | 4581558H1 | 1328 | 1543 |
| 196 | g2307061 | 1330 | 1763 |
| 196 | 4386045H1 | 1371 | 1651 |
| 196 | 4700744H1 | 1373 | 1635 |
| 196 | 6812975J1 | 1426 | 2021 |
| 196 | 6484322H1 | 1438 | 1623 |
| 196 | 1912429H1 | 1473 | 1693 |
| 196 | g1440342 | 1498 | 1770 |
| 196 | g4524899 | 1511 | 1896 |
| 196 | g768901 | 1513 | 1820 |
| 196 | g571029 | 1512 | 1840 |
| 196 | g880779 | 1513 | 1841 |
| 196 | g832097 | 1513 | 1884 |
| 196 | 4623266H1 | 1566 | 1825 |
| 196 | 3519427H1 | 1590 | 1955 |
| 196 | 3680478H1 | 1608 | 1840 |
| 196 | 6332293H1 | 1668 | 2034 |
| 196 | 4832174H1 | 1735 | 1965 |
| 196 | g1329683 | 1739 | 2321 |
| 196 | g787502 | 1779 | 2009 |
| 196 | g864605 | 1779 | 2053 |
| 196 | g787457 | 1779 | 2024 |
| 196 | g841915 | 1778 | 2047 |
| 196 | 5589418H1 | 1784 | 2030 |
| 196 | 5071250H1 | 1803 | 2062 |
| 196 | 3865563H1 | 1843 | 2217 |
| 196 | 1955962H1 | 1894 | 2151 |
| 196 | 4750673H2 | 1945 | 2009 |
| 196 | 442154H1 | 1966 | 2272 |
| 196 | 261197H1 | 1965 | 2281 |
| 196 | 444335H1 | 1966 | 2225 |
| 196 | 4515301H1 | 2028 | 2284 |
| 196 | 3780534H1 | 2055 | 2353 |
| 196 | 2191782F6 | 2063 | 2373 |
| 196 | 2191782H1 | 2063 | 2304 |
| 196 | 3735668H1 | 2072 | 2331 |
| 196 | 3038357H1 | 2117 | 2391 |
| 196 | 6812975H1 | 2124 | 2462 |
| 196 | 4633908H1 | 2138 | 2408 |
| 196 | 1339250F6 | 2140 | 2483 |
| 196 | 1339250H1 | 2140 | 2404 |
| 196 | 1339250T6 | 2142 | 2469 |
| 196 | 4324610H1 | 2150 | 2401 |
| 196 | 4266784H2 | 2156 | 2439 |
| 196 | 4834124H1 | 2174 | 2358 |
| 196 | g1783896 | 2175 | 2516 |
| 196 | g2207390 | 2175 | 2518 |
| 196 | 908344R2 | 2180 | 2516 |
| 196 | 908344H1 | 2180 | 2285 |
| 196 | 4748325H1 | 2199 | 2467 |
| 196 | 4746557H1 | 2200 | 2439 |
| 196 | g1859648 | 2231 | 2520 |
| 196 | 5565332H1 | 2244 | 2501 |
| 196 | g778446 | 2320 | 2632 |
| 196 | g831074 | 2319 | 2636 |
| 196 | g2053046 | 2330 | 2794 |
| 196 | 3031124H1 | 2353 | 2644 |
| 196 | 2277831H1 | 2391 | 2660 |
| 196 | 2277831R6 | 2391 | 2516 |
| 196 | g2552923 | 2437 | 2906 |
| 196 | g832055 | 2523 | 2923 |
| 196 | g1329627 | 2545 | 2922 |
| 196 | g4990052 | 2547 | 2834 |
| 196 | g4311136 | 2547 | 2993 |
| 196 | g4988520 | 2547 | 3007 |
| 196 | g4740301 | 2547 | 2833 |
| 196 | g3422370 | 2548 | 2923 |
| 196 | g4289096 | 2548 | 2904 |
| 196 | g3431513 | 2549 | 2876 |
| 196 | 000140H1 | 2555 | 2911 |
| 196 | 2543809H1 | 2555 | 2770 |
| 196 | 2435619H1 | 2555 | 2713 |
| 196 | g5113593 | 2555 | 2917 |
| 196 | g4189560 | 2555 | 2877 |
| 196 | g3108551 | 2555 | 2916 |
| 196 | g1476749 | 2557 | 2878 |
| 196 | g5112875 | 2555 | 2909 |
| 196 | g4565709 | 2555 | 2921 |
| 196 | g3280248 | 2555 | 2910 |
| 196 | g2208127 | 2555 | 2878 |
| 197 | 5965475H1 | 1 | 564 |
| 197 | g1162029 | 1 | 146 |
| 197 | g1648409 | 1 | 322 |
| 197 | 5833130H1 | 1 | 266 |
| 197 | 6151063H1 | 53 | 353 |
| 198 | 6764201J1 | 1 | 585 |
| 198 | 986476R6 | 5 | 479 |
| 198 | 986476H1 | 5 | 303 |
| 198 | 4180212H1 | 8 | 260 |
| 198 | g3933038 | 75 | 566 |
| 198 | 4029248H1 | 122 | 377 |
| 198 | 4029227H1 | 122 | 370 |
| 199 | g4196260 | 1 | 320 |
| 199 | g2218495 | 1 | 313 |
| 199 | 3685061H1 | 1 | 293 |
| 199 | 6821713J1 | 1 | 518 |
| 199 | 5372078H1 | 25 | 226 |
| 199 | 4205860H1 | 169 | 437 |
| 199 | 4205654H1 | 169 | 416 |
| 200 | 6868907H1 | 1 | 542 |
| 200 | 1543453R6 | 24 | 440 |
| 200 | 1543453H1 | 24 | 217 |
| 200 | 5055563H1 | 38 | 307 |
| 200 | 5055563F9 | 38 | 607 |
| 200 | 4778273F8 | 126 | 752 |
| 200 | 4778273H1 | 126 | 397 |
| 200 | 2724784H1 | 137 | 372 |
| 200 | 2925738H1 | 339 | 605 |
| 200 | 4778273T9 | 559 | 1136 |
| 200 | 1543453T6 | 610 | 1221 |
| 200 | 1921258H1 | 832 | 1046 |
| 200 | 1921258F6 | 833 | 1233 |
| 201 | g4664146 | 1 | 478 |
| 201 | g6140998 | 2 | 458 |
| 201 | g6144190 | 2 | 422 |
| 201 | g6139959 | 2 | 400 |
| 201 | 6764092J1 | 10 | 589 |
| 201 | g2910438 | 59 | 537 |
| 201 | 4570842H1 | 67 | 315 |
| 201 | 4921180H1 | 69 | 331 |
| 201 | 5955592H1 | 86 | 596 |
| 201 | g2904695 | 89 | 474 |
| 201 | g2841122 | 108 | 375 |
| 201 | 6982639H1 | 384 | 913 |
| 201 | 1570643T6 | 422 | 944 |
| 201 | g5232046 | 430 | 870 |
| 201 | 7377338H1 | 537 | 1127 |
| 201 | 1570643F6 | 661 | 972 |
| 201 | 3119826H1 | 732 | 1002 |
| 201 | 6097252H1 | 753 | 954 |
| 201 | 1570316H1 | 810 | 972 |
| 201 | 1570643H1 | 814 | 972 |
| 202 | 5913683H1 | 1 | 281 |
| 202 | 5320619F9 | 1 | 372 |
| 202 | 5913683F6 | 4 | 358 |
| 202 | 5321234F9 | 6 | 484 |
| 202 | 5914061H1 | 6 | 264 |
| 202 | 5914061F8 | 6 | 444 |
| 202 | 5913683T6 | 28 | 431 |
| 202 | 5913683F8 | 27 | 200 |
| 202 | 6269343H1 | 36 | 444 |
| 202 | 6269670H1 | 59 | 444 |
| 203 | 71035493V1 | 961 | 1616 |
| 203 | 5771773H1 | 971 | 1635 |
| 203 | 5952931H1 | 971 | 1230 |
| 203 | 5989634H1 | 968 | 1168 |
| 203 | 5800985H1 | 971 | 1270 |
| 203 | 5800543H1 | 976 | 1477 |
| 203 | 5805534H1 | 976 | 1299 |
| 203 | 5831382H2 | 976 | 1193 |
| 203 | 6166604H1 | 984 | 1567 |
| 203 | 6153585H1 | 982 | 1221 |
| 203 | 5804655H1 | 1003 | 1323 |
| 203 | 7075719H1 | 1022 | 1600 |
| 203 | 5798865H1 | 1027 | 1604 |
| 203 | 6964153H1 | 1031 | 1629 |
| 203 | 6183568H1 | 1031 | 1322 |
| 203 | 6183681H1 | 1031 | 1308 |
| 203 | 71001091V1 | 1050 | 1610 |
| 203 | 6217476H1 | 1061 | 1617 |
| 203 | 6148902H1 | 1068 | 1615 |
| 203 | 6114310H1 | 1078 | 1353 |
| 203 | 5806522H1 | 1090 | 1418 |
| 203 | 6146547H1 | 1093 | 1723 |
| 203 | 7220801H1 | 1094 | 1676 |
| 203 | 6132328H1 | 1094 | 1386 |
| 203 | 5995785H1 | 1095 | 1395 |
| 203 | 7322507H1 | 1099 | 1470 |
| 203 | 6113383H1 | 1100 | 1461 |
| 203 | 5975102H1 | 1102 | 1685 |
| 203 | 6148050H1 | 1102 | 1633 |
| 203 | 5977862H1 | 1102 | 1618 |
| 203 | 6038505H1 | 1104 | 1743 |
| 203 | 7080569H1 | 1103 | 1454 |
| 203 | 6116490H1 | 1102 | 1394 |
| 203 | 71360704V1 | 1105 | 1709 |
| 203 | 5892681H1 | 1104 | 1351 |
| 203 | 6164075H1 | 1107 | 1725 |
| 203 | 6181324H1 | 1107 | 1428 |
| 203 | 5770720H1 | 1114 | 1752 |
| 203 | 5797766H1 | 1114 | 1712 |
| 203 | 5826374H1 | 1118 | 1687 |
| 203 | 5796423H1 | 1114 | 1401 |
| 203 | 6036824H1 | 1117 | 1719 |
| 203 | 6034194H1 | 1117 | 1678 |
| 203 | 5769794H1 | 1118 | 1656 |
| 203 | 6134213H1 | 1117 | 1460 |
| 203 | 5770890H1 | 1122 | 1760 |
| 203 | 5976811H1 | 1134 | 1770 |
| 203 | 6178910H1 | 1139 | 1429 |
| 203 | 5975668H1 | 1145 | 1778 |
| 203 | 5975687H1 | 1145 | 1729 |
| 203 | 6214924H1 | 1146 | 1720 |
| 203 | 6183602H1 | 1162 | 1505 |
| 203 | 6183689H1 | 1162 | 1461 |
| 203 | 5803566H1 | 1165 | 1465 |
| 203 | 6040276H1 | 1169 | 1782 |
| 203 | 5975156H1 | 1169 | 1687 |
| 203 | 5973594H1 | 1169 | 1675 |
| 203 | 5995226H1 | 1169 | 1499 |
| 203 | 5993875H1 | 1170 | 1487 |
| 203 | 6078894H1 | 1169 | 1465 |
| 203 | 5825616H1 | 1173 | 1541 |
| 203 | 5921387T8 | 1177 | 1760 |
| 203 | 6042666H1 | 1187 | 1479 |
| 203 | 7185125H1 | 1194 | 1778 |
| 203 | 5993778H1 | 1197 | 1463 |
| 203 | 5993775H1 | 1193 | 1513 |
| 203 | 6168554H1 | 1198 | 1502 |
| 203 | 60047572D4 | 1199 | 1757 |
| 203 | 5824125H1 | 1200 | 1655 |
| 203 | 5994991H1 | 1200 | 1515 |
| 203 | 6112929H1 | 1204 | 1502 |
| 203 | 7330358H1 | 1219 | 1909 |
| 203 | 5768301H1 | 1220 | 1806 |
| 203 | 5769260H1 | 1218 | 1756 |
| 203 | 7330481H1 | 1221 | 1868 |
| 203 | 5995163H1 | 1233 | 1569 |
| 203 | 6959960H1 | 1236 | 1747 |
| 203 | 60206936U1 | 1239 | 1912 |
| 203 | 6034683H1 | 1243 | 1803 |
| 203 | 6169613H1 | 1244 | 1582 |
| 203 | 4294314T9 | 1258 | 1713 |
| 203 | 6041063H1 | 1248 | 1905 |
| 203 | 71035949V1 | 1252 | 1885 |
| 203 | 5952448H1 | 1256 | 1571 |
| 203 | 5974564H1 | 1254 | 1859 |
| 203 | 5991486H1 | 1255 | 1599 |
| 203 | 7264840H1 | 1257 | 1915 |
| 203 | 5991328H1 | 1255 | 1611 |
| 203 | 6112291H1 | 1256 | 1594 |
| 203 | 7080084H1 | 1261 | 1885 |
| 203 | 5771870H1 | 1263 | 1827 |
| 203 | 6170079H1 | 1262 | 1582 |
| 203 | 6080872H1 | 1264 | 1862 |
| 203 | 5824738H1 | 1269 | 1837 |
| 203 | 3390106T6 | 1274 | 1662 |
| 203 | 60221621V1 | 1274 | 1677 |
| 203 | 7004345H1 | 1284 | 1909 |
| 203 | 60109238B1 | 1286 | 1912 |
| 203 | 7186303H1 | 1290 | 1881 |
| 203 | 7025213H1 | 1297 | 1900 |
| 203 | 7182261H1 | 1299 | 1807 |
| 203 | 7193486H2 | 1306 | 1929 |
| 203 | 6736012H1 | 1319 | 1907 |
| 203 | 5970654H1 | 1322 | 1912 |
| 203 | 5770017H1 | 1327 | 1919 |
| 203 | 5802957H1 | 1327 | 1561 |
| 203 | 5800770H1 | 1328 | 1601 |
| 203 | 5804521H1 | 1331 | 1550 |
| 203 | 5995788H1 | 1330 | 1639 |
| 203 | 7331927H1 | 1332 | 1935 |
| 203 | 5769517H1 | 1333 | 1918 |
| 203 | 5967562H1 | 1333 | 1856 |
| 203 | 6163438H1 | 1337 | 1896 |
| 203 | 5953896H1 | 1338 | 1640 |
| 203 | 5789044H1 | 1338 | 1633 |
| 203 | 5975734H1 | 1339 | 1916 |
| 203 | 6078714H1 | 1338 | 1668 |
| 203 | 5786342H1 | 1338 | 1646 |
| 203 | 6175953H1 | 1340 | 1636 |
| 203 | 5805592H1 | 1340 | 1639 |
| 203 | 5952736H1 | 1351 | 1684 |
| 203 | 3693154F6 | 1354 | 1935 |
| 203 | 6217933H1 | 1356 | 1756 |
| 203 | 7160128H1 | 628 | 1197 |
| 203 | 6117709H1 | 630 | 956 |
| 203 | 6180232H1 | 632 | 859 |
| 203 | 6173095H1 | 645 | 974 |
| 203 | 6132472H1 | 645 | 956 |
| 203 | 6150854H1 | 647 | 996 |
| 203 | 5804474H1 | 647 | 944 |
| 203 | 6043158H1 | 647 | 922 |
| 203 | 6150959H1 | 647 | 898 |
| 203 | 6162572H1 | 648 | 1211 |
| 203 | 5803707H1 | 648 | 950 |
| 203 | 6111936H1 | 653 | 955 |
| 203 | 6111235H1 | 656 | 969 |
| 203 | 5953419H1 | 659 | 1020 |
| 203 | 5995735H1 | 659 | 974 |
| 203 | 6002288H1 | 659 | 917 |
| 203 | 6144013H1 | 664 | 1176 |
| 203 | 6166779H1 | 664 | 1176 |
| 203 | 6052294H1 | 666 | 889 |
| 203 | 6053478J1 | 664 | 1250 |
| 203 | 6052294J1 | 666 | 1098 |
| 203 | 5995222H1 | 671 | 1001 |
| 203 | 5990146H1 | 671 | 994 |
| 203 | 6079085H1 | 671 | 956 |
| 203 | 5798802H1 | 672 | 1277 |
| 203 | 5975323H1 | 681 | 1238 |
| 203 | 7327981H2 | 684 | 1173 |
| 203 | 6155086H1 | 691 | 1046 |
| 203 | 6183751H1 | 699 | 1001 |
| 203 | 6183830H1 | 699 | 983 |
| 203 | 6215696H1 | 701 | 1298 |
| 203 | 6109481H1 | 701 | 1023 |
| 203 | 6030242H2 | 702 | 1001 |
| 203 | 6163760H1 | 706 | 1074 |
| 203 | 6153438H1 | 710 | 1236 |
| 203 | 6111179H1 | 710 | 982 |
| 203 | 6116630H1 | 723 | 1044 |
| 203 | 6151576H1 | 726 | 998 |
| 203 | 6111753H1 | 732 | 1001 |
| 203 | 5824855H1 | 736 | 1199 |
| 203 | 5991422H1 | 740 | 1085 |
| 203 | 6180759H1 | 740 | 1069 |
| 203 | 6135676H1 | 741 | 1031 |
| 203 | 5954296H1 | 741 | 983 |
| 203 | 6154930H1 | 741 | 1095 |
| 203 | 6145090H1 | 747 | 1336 |
| 203 | 7215869H1 | 750 | 1359 |
| 203 | 6110012H1 | 754 | 1069 |
| 203 | 6135068H1 | 757 | 1061 |
| 203 | 6035941H1 | 759 | 1259 |
| 203 | 6163478H1 | 764 | 1336 |
| 203 | 5968127H1 | 760 | 1255 |
| 203 | 6178490H1 | 763 | 1018 |
| 203 | 60204862U1 | 771 | 1320 |
| 203 | 6108986H1 | 773 | 1083 |
| 203 | 6097994H1 | 787 | 1118 |
| 203 | 6165174H1 | 793 | 1081 |
| 203 | 6115201H1 | 792 | 1129 |
| 203 | 5798369H1 | 797 | 1419 |
| 203 | 5801102H1 | 797 | 1105 |
| 203 | 6112951H1 | 797 | 997 |
| 203 | 6109295H1 | 803 | 1129 |
| 203 | 6110881H1 | 805 | 1081 |
| 203 | 6179893H1 | 804 | 1105 |
| 203 | 5955376H1 | 806 | 1170 |
| 203 | 7359669H1 | 815 | 1090 |
| 203 | 6176408H1 | 813 | 1095 |
| 203 | 7004683H1 | 820 | 1427 |
| 203 | 7004582H1 | 820 | 1396 |
| 203 | 71033163V1 | 820 | 1364 |
| 203 | 5974746H1 | 827 | 1459 |
| 203 | 7325468H1 | 829 | 1480 |
| 203 | 6035163H1 | 839 | 1457 |
| 203 | 6112093H1 | 835 | 1148 |
| 203 | 6177785H1 | 836 | 1124 |
| 203 | 5798782H1 | 836 | 917 |
| 203 | 6150235H1 | 848 | 1459 |
| 203 | 5952964H1 | 849 | 1130 |
| 203 | 6218804H1 | 851 | 1196 |
| 203 | 5804744H1 | 853 | 1162 |
| 203 | 5771556H1 | 858 | 1477 |
| 203 | 5994894H1 | 856 | 1166 |
| 203 | 71036246V1 | 861 | 1368 |
| 203 | 5915476H1 | 858 | 1096 |
| 203 | 6163363H1 | 863 | 1499 |
| 203 | 5796628H1 | 870 | 1046 |
| 203 | 6115353H1 | 872 | 1144 |
| 203 | 6115444H1 | 876 | 1097 |
| 203 | 6033285H1 | 884 | 1516 |
| 203 | 6145417H1 | 890 | 1443 |
| 203 | 6172878H1 | 890 | 1197 |
| 203 | 6172790H1 | 890 | 1176 |
| 203 | 5801236H1 | 902 | 1168 |
| 203 | 6113354H1 | 906 | 1275 |
| 203 | 6032732H1 | 906 | 1459 |
| 203 | 6130142H1 | 908 | 1245 |
| 203 | 6168522H1 | 913 | 1264 |
| 203 | 6037518H1 | 915 | 1525 |
| 203 | 6032546H1 | 914 | 1542 |
| 203 | 60104786D4 | 912 | 1222 |
| 203 | 6176164H1 | 924 | 1214 |
| 203 | 6133149H1 | 913 | 1026 |
| 203 | 7320972H1 | 920 | 1515 |
| 203 | 6033149H1 | 923 | 1523 |
| 203 | 5970892H1 | 924 | 1548 |
| 203 | 6036731H1 | 925 | 1529 |
| 203 | 5970884H1 | 924 | 1510 |
| 203 | 6113366H1 | 923 | 1026 |
| 203 | 7185073H1 | 932 | 1524 |
| 203 | 5827058H1 | 935 | 988 |
| 203 | 5770524H1 | 940 | 1589 |
| 203 | 6114346H1 | 936 | 1210 |
| 203 | 5990721H1 | 942 | 1263 |
| 203 | 5975145H1 | 947 | 1489 |
| 203 | 6044290H1 | 941 | 1226 |
| 203 | 5768644H1 | 957 | 1532 |
| 203 | 5971326H1 | 948 | 1554 |
| 203 | 6110988H1 | 946 | 1173 |
| 203 | 6099321H1 | 948 | 1236 |
| 203 | 6173091H1 | 62 | 390 |
| 203 | 6036155H1 | 65 | 613 |
| 203 | 6180780H1 | 65 | 387 |
| 203 | 5770305H1 | 66 | 615 |
| 203 | 7215805H1 | 67 | 610 |
| 203 | 7024381H1 | 67 | 430 |
| 203 | 6107796H1 | 67 | 255 |
| 203 | 7221886H1 | 69 | 646 |
| 203 | 5769589H1 | 70 | 647 |
| 203 | 7328380H1 | 73 | 643 |
| 203 | 4571391F8 | 75 | 628 |
| 203 | 5771842H1 | 79 | 676 |
| 203 | 6108158H1 | 79 | 418 |
| 203 | 6176812H1 | 79 | 395 |
| 203 | 6177958H1 | 79 | 393 |
| 203 | 6179512H1 | 79 | 393 |
| 203 | 6181431H1 | 79 | 384 |
| 203 | 7008218H1 | 79 | 694 |
| 203 | 6215727H1 | 79 | 590 |
| 203 | 6151732H1 | 84 | 317 |
| 203 | 5973312H1 | 84 | 615 |
| 203 | 60126922U1 | 86 | 662 |
| 203 | 5974449H1 | 88 | 675 |
| 203 | 6111184H1 | 90 | 170 |
| 203 | 6113115H1 | 90 | 429 |
| 203 | 6000095H1 | 91 | 474 |
| 203 | 6182051H1 | 91 | 394 |
| 203 | 7272693H1 | 91 | 677 |
| 203 | 7385648H1 | 96 | 287 |
| 203 | 6135054H1 | 99 | 403 |
| 203 | 6182449H1 | 104 | 467 |
| 203 | 5775693H1 | 104 | 719 |
| 203 | 6175825H1 | 106 | 381 |
| 203 | 5968167H1 | 118 | 728 |
| 203 | 60120598D1 | 108 | 278 |
| 203 | 6147691H1 | 122 | 616 |
| 203 | 6115311H1 | 133 | 425 |
| 203 | 5975411H1 | 137 | 630 |
| 203 | 5915392H1 | 144 | 416 |
| 203 | 6130193H1 | 148 | 465 |
| 203 | 7328558H1 | 147 | 830 |
| 203 | 5996192H1 | 166 | 467 |
| 203 | 5977403H1 | 168 | 658 |
| 203 | 5989334H1 | 177 | 480 |
| 203 | 6109928H1 | 179 | 509 |
| 203 | 6172501H1 | 186 | 392 |
| 203 | 6172633H1 | 186 | 479 |
| 203 | 7183712H1 | 187 | 769 |
| 203 | 7025064H1 | 194 | 618 |
| 203 | 7325279H1 | 201 | 812 |
| 203 | 6116494H1 | 204 | 493 |
| 203 | 5953527H1 | 210 | 543 |
| 203 | 5892842H1 | 214 | 481 |
| 203 | 5993811H1 | 218 | 546 |
| 203 | 6109818H1 | 226 | 448 |
| 203 | 6044864H1 | 228 | 751 |
| 203 | 6182368H1 | 242 | 578 |
| 203 | 7326560H2 | 250 | 893 |
| 203 | 6033805H1 | 253 | 837 |
| 203 | 6101869H1 | 257 | 545 |
| 203 | 6170505H1 | 265 | 596 |
| 203 | 6152125H1 | 265 | 596 |
| 203 | 6137458H1 | 265 | 568 |
| 203 | 5958352H1 | 265 | 856 |
| 203 | 5975525H1 | 294 | 899 |
| 203 | 5838053H1 | 296 | 585 |
| 203 | 5796171H1 | 304 | 858 |
| 203 | 6112187H1 | 310 | 639 |
| 203 | 6165284H1 | 313 | 858 |
| 203 | 5826529H1 | 320 | 764 |
| 203 | 6172048H1 | 336 | 644 |
| 203 | 6035764H1 | 326 | 932 |
| 203 | 6966778H1 | 329 | 425 |
| 203 | 6172080H1 | 328 | 576 |
| 203 | 7182401H1 | 354 | 954 |
| 203 | 7269240H1 | 357 | 994 |
| 203 | 6029089H1 | 360 | 667 |
| 203 | 6100553H1 | 367 | 674 |
| 203 | 5825841H1 | 387 | 1002 |
| 203 | 7214023H1 | 396 | 923 |
| 203 | 6109604H1 | 393 | 729 |
| 203 | 6143986H1 | 411 | 1031 |
| 203 | 6117765H1 | 421 | 543 |
| 203 | 6136677H1 | 423 | 744 |
| 203 | 6041789H1 | 430 | 1047 |
| 203 | 5989594H1 | 448 | 730 |
| 203 | 6053478H1 | 452 | 1086 |
| 203 | 6109628H1 | 453 | 711 |
| 203 | 6044864J1 | 455 | 1098 |
| 203 | 7180879H1 | 457 | 1063 |
| 203 | 5797850H1 | 461 | 930 |
| 203 | 6115841H1 | 461 | 756 |
| 203 | 6137438H1 | 468 | 772 |
| 203 | 6731970H1 | 474 | 1055 |
| 203 | 6108268H1 | 478 | 793 |
| 203 | 6115462H1 | 491 | 718 |
| 203 | 5891369H1 | 517 | 775 |
| 203 | 6001442H1 | 524 | 1096 |
| 203 | 7360854H1 | 525 | 694 |
| 203 | 5974453H1 | 539 | 1087 |
| 203 | 6109032H1 | 534 | 897 |
| 203 | 5892176H1 | 534 | 868 |
| 203 | 5953990H1 | 534 | 804 |
| 203 | 5831262H1 | 534 | 726 |
| 203 | 5955474H1 | 543 | 886 |
| 203 | 5955458H1 | 543 | 888 |
| 203 | 6111439H1 | 544 | 769 |
| 203 | 6111316H1 | 546 | 881 |
| 203 | 5797137H1 | 577 | 1094 |
| 203 | 6133207H1 | 586 | 897 |
| 203 | 7328606H1 | 589 | 1133 |
| 203 | 7261854H1 | 590 | 1225 |
| 203 | 6100514H1 | 596 | 898 |
| 203 | 6040074H1 | 599 | 1199 |
| 203 | 5824550H1 | 606 | 1060 |
| 203 | 2814920F7 | 612 | 1092 |
| 203 | 6181437H1 | 617 | 905 |
| 203 | 5771704H1 | 626 | 1260 |
| 203 | 6131361H1 | 624 | 937 |
| 203 | 71216557V1 | 628 | 1188 |
| 203 | 6141011H1 | 1 | 156 |
| 203 | 6108212H1 | 1 | 324 |
| 203 | 6177861H1 | 2 | 301 |
| 203 | 5976933H1 | 12 | 479 |
| 203 | 7024610H1 | 39 | 249 |
| 203 | 5973147H1 | 35 | 622 |
| 203 | 6735535H1 | 39 | 221 |
| 203 | 7279008H1 | 39 | 531 |
| 203 | 60264017D1 | 32 | 569 |
| 203 | 7079629H2 | 44 | 358 |
| 203 | 5972573H1 | 41 | 686 |
| 203 | 7160586H1 | 34 | 619 |
| 203 | 6784013H1 | 35 | 645 |
| 203 | 7083178H1 | 36 | 637 |
| 203 | 7182216H1 | 36 | 592 |
| 203 | 7184701H1 | 36 | 578 |
| 203 | 6170753H1 | 36 | 341 |
| 203 | 7261837H1 | 36 | 644 |
| 203 | 6180976H1 | 37 | 372 |
| 203 | 6170740H1 | 37 | 340 |
| 203 | 7262607H1 | 39 | 648 |
| 203 | 7220667H1 | 38 | 636 |
| 203 | 7182859H1 | 39 | 616 |
| 203 | 6099372H1 | 39 | 324 |
| 203 | 7260783H1 | 39 | 675 |
| 203 | 7316234H1 | 39 | 709 |
| 203 | 4625563F9 | 39 | 673 |
| 203 | 7160372H1 | 39 | 643 |
| 203 | 7160758H1 | 39 | 615 |
| 203 | 7216608H1 | 39 | 623 |
| 203 | 7219614H1 | 39 | 613 |
| 203 | 7213493H1 | 39 | 643 |
| 203 | 7160235H1 | 39 | 555 |
| 203 | 7317368H1 | 39 | 420 |
| 203 | 6097675H1 | 39 | 380 |
| 203 | 6098127H1 | 39 | 375 |
| 203 | 6171834H1 | 39 | 358 |
| 203 | 6169216H1 | 39 | 372 |
| 203 | 6131659H1 | 39 | 358 |
| 203 | 6177913H1 | 39 | 350 |
| 203 | 6109871H1 | 39 | 347 |
| 203 | 6132882H1 | 39 | 346 |
| 203 | 6136114H1 | 39 | 340 |
| 203 | 6132559H1 | 39 | 328 |
| 203 | 5989784H1 | 39 | 328 |
| 203 | 6135227H1 | 39 | 339 |
| 203 | 6028575H1 | 39 | 267 |
| 203 | 5914782H1 | 57 | 278 |
| 203 | 7359725H1 | 39 | 685 |
| 203 | 6084122H1 | 40 | 673 |
| 203 | 7083662H1 | 39 | 685 |
| 203 | 7358734H1 | 39 | 682 |
| 203 | 7181284H1 | 39 | 557 |
| 203 | 60264004D1 | 39 | 552 |
| 203 | 6080769H1 | 50 | 645 |
| 203 | 7212965H1 | 39 | 444 |
| 203 | 6174304H1 | 39 | 387 |
| 203 | 6117564H1 | 40 | 363 |
| 203 | 6132067H1 | 39 | 350 |
| 203 | 6099630H1 | 39 | 322 |
| 203 | 6134055H1 | 62 | 379 |
| 203 | 5994380H1 | 42 | 384 |
| 203 | 6098224H1 | 42 | 362 |
| 203 | 6132993H1 | 42 | 337 |
| 203 | 7213881H1 | 43 | 644 |
| 203 | 6081567H1 | 43 | 636 |
| 203 | 6132164H1 | 43 | 385 |
| 203 | 6101109H1 | 43 | 377 |
| 203 | 5992072H1 | 43 | 372 |
| 203 | 6078760H1 | 43 | 365 |
| 203 | 5995191H1 | 43 | 374 |
| 203 | 6171974H1 | 43 | 359 |
| 203 | 5989890H1 | 43 | 350 |
| 203 | 6181359H1 | 44 | 353 |
| 203 | 6110331H1 | 43 | 347 |
| 203 | 6111434H1 | 43 | 339 |
| 203 | 6168435H1 | 43 | 284 |
| 203 | 7268992H1 | 45 | 675 |
| 203 | 6081557H1 | 44 | 614 |
| 203 | 6110567H1 | 43 | 283 |
| 203 | 7272829H1 | 45 | 685 |
| 203 | 5992910H1 | 45 | 388 |
| 203 | 6131653H1 | 47 | 373 |
| 203 | 5796567H1 | 45 | 109 |
| 203 | 7263260H1 | 46 | 647 |
| 203 | 7158311H1 | 46 | 588 |
| 203 | 6097721H1 | 47 | 393 |
| 203 | 6136962H1 | 46 | 404 |
| 203 | 6170754H1 | 47 | 353 |
| 203 | 6107830H1 | 47 | 235 |
| 203 | 7275183H1 | 48 | 644 |
| 203 | 7182041H1 | 49 | 616 |
| 203 | 7182971H1 | 49 | 616 |
| 203 | 5991415H1 | 48 | 388 |
| 203 | 6112705H1 | 48 | 373 |
| 203 | 6098861H1 | 48 | 347 |
| 203 | 6099983H1 | 48 | 243 |
| 203 | 7283631H1 | 49 | 718 |
| 203 | 6039521H1 | 49 | 650 |
| 203 | 5992224H1 | 49 | 375 |
| 203 | 6170022H1 | 49 | 387 |
| 203 | 5992273H1 | 49 | 363 |
| 203 | 6114538H1 | 48 | 348 |
| 203 | 7272102H1 | 50 | 635 |
| 203 | 6136863H1 | 50 | 389 |
| 203 | 6085163H1 | 68 | 331 |
| 203 | 6115314H1 | 50 | 306 |
| 203 | 7270954H1 | 51 | 687 |
| 203 | 7190289H2 | 51 | 619 |
| 203 | 4624253F8 | 54 | 733 |
| 203 | 6037863H1 | 54 | 590 |
| 203 | 5973394H1 | 54 | 630 |
| 203 | 6168342H1 | 54 | 412 |
| 203 | 6733426H1 | 73 | 419 |
| 203 | 5770643H1 | 55 | 644 |
| 203 | 6733166H1 | 54 | 647 |
| 203 | 7321688H1 | 58 | 593 |
| 203 | 6038935H1 | 58 | 635 |
| 203 | 6134077H1 | 56 | 399 |
| 203 | 7185189H1 | 56 | 643 |
| 203 | 6034778H1 | 59 | 683 |
| 203 | 7330333H1 | 58 | 524 |
| 203 | 7184720H1 | 62 | 640 |
| 203 | 60104786B2 | 1354 | 1910 |
| 203 | 6177422H1 | 1353 | 1657 |
| 203 | 5824565H1 | 1360 | 1894 |
| 203 | 6110675H1 | 1364 | 1676 |
| 203 | 6042367H1 | 1364 | 1661 |
| 203 | 6035204H1 | 1366 | 1929 |
| 203 | 6170972H1 | 1365 | 1682 |
| 203 | 6181601H1 | 1365 | 1667 |
| 203 | 5802968H1 | 1367 | 1676 |
| 203 | 4362784F8 | 1372 | 1927 |
| 203 | 5996082H1 | 1377 | 1699 |
| 203 | 5996003H1 | 1375 | 1666 |
| 203 | 5995203H1 | 1382 | 1721 |
| 203 | 6133437H1 | 1383 | 1700 |
| 203 | 6178414H1 | 1393 | 1699 |
| 203 | 6179001H1 | 1401 | 1548 |
| 203 | 5769429H1 | 1403 | 1918 |
| 203 | 5785086H1 | 1404 | 1722 |
| 203 | 5801902H1 | 1405 | 1725 |
| 203 | 5792833H1 | 1404 | 1477 |
| 203 | 5949501H1 | 1415 | 1784 |
| 203 | g6228962 | 1428 | 1937 |
| 203 | g6228709 | 1432 | 1938 |
| 203 | g6300732 | 1431 | 1938 |
| 203 | 60126922B1 | 1434 | 1887 |
| 203 | 6173439H1 | 1434 | 1747 |
| 203 | 5769804H1 | 1434 | 1920 |
| 203 | g6301637 | 1436 | 1938 |
| 203 | g6302015 | 1437 | 1936 |
| 203 | 5953730H1 | 1440 | 1530 |
| 203 | 5770049H1 | 1440 | 1927 |
| 203 | 7082145H1 | 1440 | 1907 |
| 203 | g6301063 | 1443 | 1936 |
| 203 | 6133907H1 | 1444 | 1778 |
| 203 | g6039672 | 1445 | 1932 |
| 203 | g6301561 | 1453 | 1938 |
| 203 | 5990839H1 | 1456 | 1799 |
| 203 | 5768633H1 | 1459 | 1920 |
| 203 | g6229211 | 1555 | 1933 |
| 203 | g6132479 | 1555 | 1933 |
| 203 | g6030521 | 1555 | 1935 |
| 203 | g6197062 | 1561 | 1937 |
| 203 | 6152884H1 | 1564 | 1869 |
| 203 | g6471957 | 1565 | 1928 |
| 203 | 5955189H1 | 1566 | 1854 |
| 203 | 6030104H2 | 1566 | 1861 |
| 203 | 5805947H1 | 1565 | 1840 |
| 203 | 5771690H1 | 1566 | 1928 |
| 203 | g6030549 | 1568 | 1928 |
| 203 | g6198562 | 1567 | 1928 |
| 203 | 6097965H1 | 1568 | 1889 |
| 203 | 6151677H1 | 1571 | 1866 |
| 203 | 5974518H1 | 1571 | 1926 |
| 203 | g6229210 | 1574 | 1933 |
| 203 | 6028702H1 | 1579 | 1813 |
| 203 | g6470581 | 1580 | 1920 |
| 203 | g6198908 | 1587 | 1928 |
| 203 | g6044672 | 1588 | 1928 |
| 203 | g6470803 | 1511 | 1930 |
| 203 | g6027906 | 1513 | 1934 |
| 203 | g6074740 | 1524 | 1928 |
| 203 | g6026164 | 1523 | 1928 |
| 203 | g6133768 | 1528 | 1932 |
| 203 | 6179968H1 | 1526 | 1784 |
| 203 | 5991468H1 | 1528 | 1863 |
| 203 | 5786634H1 | 1530 | 1832 |
| 203 | 5786701H1 | 1530 | 1715 |
| 203 | 5786734H1 | 1532 | 1652 |
| 203 | g6047869 | 1534 | 1921 |
| 203 | 6176458H1 | 1547 | 1825 |
| 203 | 5816770H1 | 1550 | 1883 |
| 203 | 5817968H1 | 1550 | 1746 |
| 203 | g6471065 | 1550 | 1928 |
| 203 | 5817174H1 | 1550 | 1832 |
| 203 | g6471718 | 1552 | 1937 |
| 203 | g6464005 | 1552 | 1937 |
| 203 | 6108818H1 | 1554 | 1787 |
| 203 | 7181625H1 | 1553 | 1920 |
| 203 | g6043984 | 1488 | 1938 |
| 203 | g6476041 | 1488 | 1930 |
| 203 | g6075390 | 1489 | 1937 |
| 203 | g6028910 | 1490 | 1937 |
| 203 | g6073495 | 1490 | 1930 |
| 203 | g6401184 | 1490 | 1930 |
| 203 | g6073672 | 1490 | 1937 |
| 203 | g6036791 | 1489 | 1928 |
| 203 | g6026147 | 1492 | 1935 |
| 203 | g6036640 | 1492 | 1920 |
| 203 | 6157091H1 | 1492 | 1813 |
| 203 | g6033899 | 1493 | 1928 |
| 203 | g6198865 | 1493 | 1938 |
| 203 | 6219812H2 | 1500 | 1886 |
| 203 | 6192668H1 | 1501 | 1814 |
| 203 | 5768793H1 | 1505 | 1920 |
| 203 | 6191666H1 | 1501 | 1804 |
| 203 | g6473184 | 1502 | 1934 |
| 203 | g6476087 | 1502 | 1928 |
| 203 | 5993364H1 | 1503 | 1813 |
| 203 | g6438645 | 1503 | 1928 |
| 203 | g6076043 | 1504 | 1928 |
| 203 | 6043152H1 | 1519 | 1787 |
| 203 | g6472040 | 1509 | 1937 |
| 203 | 6179110H1 | 1511 | 1806 |
| 203 | g6400409 | 1476 | 1929 |
| 203 | g6036079 | 1476 | 1928 |
| 203 | g6086332 | 1477 | 1934 |
| 203 | g6199417 | 1477 | 1933 |
| 203 | g6044232 | 1478 | 1936 |
| 203 | g6029466 | 1478 | 1935 |
| 203 | g6439518 | 1479 | 1934 |
| 203 | g6462956 | 1479 | 1934 |
| 203 | g6439604 | 1480 | 1937 |
| 203 | g6196631 | 1480 | 1938 |
| 203 | g6439647 | 1479 | 1930 |
| 203 | g6131743 | 1480 | 1935 |
| 203 | g6044247 | 1480 | 1928 |
| 203 | 6034847H1 | 1482 | 1911 |
| 203 | g6117455 | 1481 | 1933 |
| 203 | g6464482 | 1481 | 1928 |
| 203 | g6036141 | 1481 | 1928 |
| 203 | g6047637 | 1481 | 1928 |
| 203 | g6117632 | 1482 | 1930 |
| 203 | g6463078 | 1482 | 1936 |
| 203 | g6035703 | 1480 | 1936 |
| 203 | g6076131 | 1482 | 1932 |
| 203 | g6196780 | 1482 | 1932 |
| 203 | g6031028 | 1483 | 1930 |
| 203 | g6464375 | 1484 | 1928 |
| 203 | g6043231 | 1484 | 1929 |
| 203 | g6117300 | 1485 | 1933 |
| 203 | g6200216 | 1484 | 1938 |
| 203 | g6040103 | 1485 | 1932 |
| 203 | g6399002 | 1485 | 1926 |
| 203 | g6029144 | 1486 | 1934 |
| 203 | g6043655 | 1487 | 1937 |
| 203 | g6196472 | 1489 | 1934 |
| 203 | g6034277 | 1815 | 1920 |
| 203 | g6117025 | 1815 | 1920 |
| 203 | g6199037 | 1815 | 1920 |
| 203 | g6198912 | 1823 | 1928 |
| 203 | g6473327 | 1833 | 1928 |
| 203 | g6463164 | 1841 | 1930 |
| 203 | 5920960H1 | 1844 | 1925 |
| 203 | g6198784 | 1856 | 1926 |
| 203 | 5787770H1 | 1722 | 1981 |
| 203 | 5789227H1 | 1722 | 1927 |
| 203 | g6074506 | 1728 | 1938 |
| 203 | 6166065H1 | 1741 | 1956 |
| 203 | g6029762 | 1746 | 1876 |
| 203 | 5786021H1 | 1754 | 1926 |
| 203 | g6438899 | 1763 | 1928 |
| 203 | 5992585H1 | 1769 | 1920 |
| 203 | 6158235H1 | 1865 | 1940 |
| 203 | 5946071H1 | 1668 | 1917 |
| 203 | 5950118H1 | 1668 | 1905 |
| 203 | 6157445H1 | 1668 | 1850 |
| 203 | 5946973H1 | 1668 | 1920 |
| 203 | 5767935H1 | 1670 | 1920 |
| 203 | 5767973H1 | 1670 | 1912 |
| 203 | 5947508H1 | 1672 | 1934 |
| 203 | 5790266H1 | 1674 | 1920 |
| 203 | g6400408 | 1676 | 1938 |
| 203 | 7338126H1 | 1680 | 1932 |
| 203 | 7350525H1 | 1686 | 1936 |
| 203 | g6398110 | 1686 | 1938 |
| 203 | g6402278 | 1686 | 1938 |
| 203 | 6157246H1 | 1686 | 1827 |
| 203 | g6197883 | 1687 | 1928 |
| 203 | g6046641 | 1691 | 1928 |
| 203 | g6400764 | 1692 | 1928 |
| 203 | g6076220 | 1693 | 1928 |
| 203 | 5794559H1 | 1695 | 1926 |
| 203 | g6033633 | 1695 | 1926 |
| 203 | 5787563H1 | 1695 | 1925 |
| 203 | g6117328 | 1708 | 1937 |
| 203 | g6044253 | 1710 | 1929 |
| 203 | g6398246 | 1721 | 1928 |
| 203 | g6131945 | 1465 | 1929 |
| 203 | 6181714H1 | 1466 | 1806 |
| 203 | g6048081 | 1466 | 1928 |
| 203 | g6047077 | 1466 | 1932 |
| 203 | g6132102 | 1468 | 1929 |
| 203 | g6398647 | 1468 | 1929 |
| 203 | g6400444 | 1468 | 1929 |
| 203 | g6086266 | 1468 | 1928 |
| 203 | g6132321 | 1469 | 1928 |
| 203 | g6132239 | 1470 | 1930 |
| 203 | g6074116 | 1468 | 1928 |
| 203 | 5990574H1 | 1470 | 1804 |
| 203 | g6400620 | 1470 | 1930 |
| 203 | g6074889 | 1470 | 1928 |
| 203 | g6473566 | 1469 | 1928 |
| 203 | g6400824 | 1472 | 1936 |
| 203 | g6132812 | 1472 | 1930 |
| 203 | g6400805 | 1472 | 1938 |
| 203 | g6400717 | 1472 | 1928 |
| 203 | g6030907 | 1473 | 1928 |
| 203 | g6047234 | 1474 | 1930 |
| 203 | 7180844H1 | 1459 | 1928 |
| 203 | g6035938 | 1464 | 1916 |
| 203 | g6439666 | 1475 | 1928 |
| 203 | g6036991 | 1475 | 1928 |
| 203 | g6047968 | 1475 | 1930 |
| 203 | g6036801 | 1476 | 1937 |
| 203 | g6196212 | 1600 | 1928 |
| 203 | 6177877H1 | 1603 | 1888 |
| 203 | g6039199 | 1605 | 1928 |
| 203 | g6438679 | 1604 | 1920 |
| 203 | g6400557 | 1611 | 1928 |
| 203 | 5817262H1 | 1615 | 1904 |
| 203 | 5817362H1 | 1615 | 1906 |
| 203 | 5820474H1 | 1615 | 1915 |
| 203 | 6102129H1 | 1619 | 1928 |
| 203 | g6074067 | 1653 | 1932 |
| 203 | g6132060 | 1656 | 1935 |
| 203 | 3775108F9 | 1656 | 1912 |
| 203 | g6198405 | 1665 | 1929 |
| 203 | 6178153H1 | 1665 | 1928 |
| 203 | g6045038 | 1666 | 1911 |
| 203 | 5770026H1 | 1668 | 1946 |
| 203 | 5792284H1 | 1668 | 1920 |
| 203 | g6028253 | 1588 | 1930 |
| 203 | g6475978 | 1593 | 1932 |
| 203 | 6175948H1 | 1593 | 1891 |
| 203 | g6132639 | 1594 | 1928 |
| 203 | g6463340 | 1597 | 1928 |
| 203 | g6046756 | 1596 | 1928 |
| 204 | 6844571H1 | 664 | 1221 |
| 204 | 1299074T6 | 715 | 1264 |
| 204 | 1751671T6 | 860 | 1258 |
| 204 | 6941680H1 | 769 | 1245 |
| 204 | 1426502T6 | 979 | 1248 |
| 204 | 2825904H1 | 984 | 1241 |
| 204 | 6825511H1 | 594 | 1115 |
| 204 | 6827717H1 | 676 | 1155 |
| 204 | 6828967J1 | 813 | 1145 |
| 204 | 6825030H1 | 823 | 1116 |
| 204 | 6825030J1 | 822 | 1115 |
| 204 | 1470306H1 | 921 | 1114 |
| 204 | 6827717J1 | 434 | 1076 |
| 204 | 1945447H1 | 808 | 1051 |
| 204 | 5870352H1 | 729 | 1007 |
| 204 | 6826536J1 | 1157 | 1756 |
| 204 | 6822128J1 | 829 | 984 |
| 204 | 6826536H1 | 1143 | 1742 |
| 204 | g3056033 | 1065 | 1305 |
| 204 | g5837846 | 816 | 1289 |
| 204 | g2986193 | 1027 | 1297 |
| 204 | 6831310H1 | 845 | 1278 |
| 204 | 1631532H1 | 1227 | 1297 |
| 204 | g3150672 | 914 | 1287 |
| 204 | g2236974 | 899 | 1287 |
| 204 | g4889379 | 1021 | 1302 |
| 204 | 2255054R6 | 393 | 777 |
| 204 | 6498130H1 | 312 | 777 |
| 204 | 2255054H1 | 549 | 777 |
| 204 | 6826447H1 | 357 | 752 |
| 204 | 6826447J1 | 357 | 752 |
| 204 | 1579339H1 | 502 | 713 |
| 204 | 4443559H1 | 474 | 613 |
| 204 | 2042892H1 | 315 | 568 |
| 204 | 3358238H1 | 329 | 566 |
| 204 | 4750087H1 | 185 | 453 |
| 204 | 6824269H1 | 386 | 880 |
| 204 | 6824349H1 | 350 | 851 |
| 204 | 2184748H1 | 179 | 463 |
| 204 | 6756704J1 | 235 | 808 |
| 204 | 2184748F6 | 1 | 463 |
| 204 | 6756496H1 | 234 | 432 |
| 204 | 6756704H1 | 255 | 432 |
| 204 | 1299074H1 | 161 | 401 |
| 204 | 6824091H1 | 156 | 422 |
| 204 | 3698810H1 | 13 | 304 |
| 204 | 1751671H1 | 621 | 843 |
| 204 | g1616031 | 448 | 783 |
| 204 | 6824349J1 | 147 | 796 |
| 204 | 4516155H1 | 541 | 775 |
| 204 | 4672305H1 | 94 | 298 |
| 204 | 6829925H1 | 1303 | 1619 |
| 204 | 1426502H1 | 1438 | 1679 |
| 204 | 6829925J1 | 1303 | 1618 |
| 204 | 6824269J1 | 875 | 1484 |
| 204 | 6824288J1 | 805 | 1385 |
| 204 | 6825511J1 | 786 | 1392 |
| 204 | g5856181 | 886 | 1309 |
| 204 | g824615 | 1112 | 1275 |
| 204 | 6802929J1 | 833 | 1289 |
| 204 | g5127144 | 929 | 1299 |
| 204 | g2344128 | 1075 | 1315 |
| 204 | 6458046H1 | 929 | 1285 |
| 204 | g2397910 | 1064 | 1302 |
| 204 | g2278427 | 1157 | 1301 |
| 204 | g3058045 | 823 | 1284 |
| 204 | 6820991H1 | 747 | 1284 |
| 204 | 2255054T6 | 705 | 1267 |
| 204 | 6822128H1 | 514 | 951 |
| 204 | 6802929H1 | 535 | 920 |
| 204 | 6825384H1 | 424 | 928 |
| 204 | 6824288H1 | 498 | 991 |
| 204 | 6824091J1 | 335 | 879 |
| 204 | 3512547H1 | 1455 | 1695 |
| 204 | 6804257H1 | 1157 | 1691 |
| 204 | 3700061H1 | 1404 | 1683 |
| 204 | 1426502F6 | 1335 | 1679 |
| 204 | 755545H1 | 1439 | 1679 |
| 204 | 6498381H1 | 1158 | 1726 |
| 205 | 1858538T6 | 1354 | 1583 |
| 205 | 1810993T6 | 1360 | 1586 |
| 205 | 1810792H1 | 1281 | 1506 |
| 205 | 2625825H1 | 1367 | 1595 |
| 205 | 2228636T6 | 1368 | 1586 |
| 205 | 1724417T6 | 1386 | 1586 |
| 205 | 2689550T6 | 1333 | 1586 |
| 205 | 2689550F6 | 1 | 511 |
| 205 | 2689550H1 | 1 | 265 |
| 205 | 6476804H1 | 3 | 563 |
| 205 | 1545750H1 | 17 | 163 |
| 205 | g2244465 | 68 | 341 |
| 205 | 1494653H1 | 351 | 402 |
| 205 | 1858538H1 | 400 | 682 |
| 205 | 2218749F6 | 474 | 916 |
| 205 | 2228636F6 | 474 | 908 |
| 205 | 2228636H1 | 474 | 714 |
| 205 | 1724288H1 | 642 | 852 |
| 205 | 1724417H1 | 642 | 852 |
| 205 | 1724417F6 | 642 | 998 |
| 205 | 1724064H1 | 642 | 841 |
| 205 | 1724064F6 | 642 | 1096 |
| 205 | 6549336H1 | 1002 | 1419 |
| 205 | 4822845H1 | 1024 | 1261 |
| 205 | 1810993F6 | 1281 | 1558 |
| 205 | 1810993H1 | 1281 | 1518 |
| 206 | 6045641H1 | 1 | 364 |
| 206 | 6045641J1 | 1 | 364 |
| 206 | 3179825H1 | 120 | 424 |
| 206 | 3179825F6 | 120 | 672 |
| 206 | 4758644H1 | 141 | 409 |
| 206 | 2966833H1 | 222 | 484 |
| 206 | 5372448H1 | 327 | 481 |
| 206 | 2686267H1 | 359 | 619 |
| 206 | 3722865H1 | 425 | 558 |
| 206 | 5036810H1 | 463 | 731 |
| 206 | 4164428H1 | 519 | 787 |
| 206 | 3799675H1 | 563 | 731 |
| 206 | 4708839H1 | 568 | 851 |
| 206 | 2952970H1 | 602 | 865 |
| 206 | 3561988H1 | 633 | 928 |
| 206 | 856538H1 | 642 | 846 |
| 206 | 2487001F6 | 672 | 1061 |
| 206 | 2487001H1 | 672 | 829 |
| 206 | 4980831H1 | 862 | 1147 |
| 206 | 2620607H1 | 875 | 1129 |
| 206 | 3873170H1 | 876 | 1028 |
| 206 | 4575663H1 | 912 | 1190 |
| 206 | 6155913H1 | 953 | 1276 |
| 206 | 4543658H1 | 1005 | 1249 |
| 206 | 5064775H1 | 1104 | 1345 |
| 206 | g1014062 | 1144 | 1418 |
| 206 | 6249620H1 | 1173 | 1668 |
| 206 | 2881132F6 | 1223 | 1489 |
| 206 | 2881132H1 | 1223 | 1496 |
| 206 | g1949025 | 1228 | 1546 |
| 206 | 4552262H1 | 1238 | 1500 |
| 206 | 950155H1 | 1278 | 1523 |
| 206 | 1705026H1 | 1316 | 1527 |
| 206 | 4398180H1 | 1331 | 1571 |
| 206 | 3179825T6 | 1418 | 1909 |
| 206 | 2487001T6 | 1441 | 2006 |
| 206 | 6097383H1 | 1482 | 1798 |
| 206 | g2251371 | 1596 | 2047 |
| 206 | g4072810 | 1631 | 2050 |
| 206 | g3889774 | 1700 | 2050 |
| 206 | g4087488 | 1749 | 2056 |
| 206 | g1014063 | 1798 | 2030 |
| 206 | 2881132T6 | 1809 | 2005 |
| 206 | g1195443 | 1885 | 2047 |
| 206 | g2155148 | 1942 | 2053 |
| 207 | 6803514H1 | 503 | 984 |
| 207 | 6803514J1 | 242 | 823 |
| 207 | 6286909H2 | 316 | 799 |
| 207 | g4568721 | 260 | 685 |
| 207 | g3742689 | 209 | 684 |
| 207 | g5365250 | 586 | 679 |
| 207 | g5676607 | 451 | 679 |
| 207 | g4111591 | 263 | 679 |
| 207 | g2539496 | 299 | 678 |
| 207 | g5769156 | 224 | 677 |
| 207 | g5232991 | 277 | 675 |
| 207 | g3090059 | 202 | 676 |
| 207 | g3751723 | 261 | 676 |
| 207 | g4299176 | 248 | 676 |
| 207 | g5630519 | 273 | 675 |
| 207 | 5743674T7 | 354 | 545 |
| 207 | 5743674H1 | 1 | 297 |
| 207 | 4127943H1 | 1 | 246 |
| 207 | 5743674R7 | 1 | 183 |
| 208 | 1952854T6 | 1 | 565 |
| 209 | 2917244T6 | 1 | 567 |
| 209 | 2917244H1 | 1 | 156 |
| 209 | 2917244F6 | 1 | 567 |
| 210 | 5507875H1 | 1 | 219 |
| 210 | 5507875F6 | 1 | 393 |
| 210 | 3510289H1 | 1 | 276 |
| 210 | 6985373H1 | 20 | 382 |
| 210 | 6985355H1 | 20 | 540 |
| 210 | 4715879H1 | 20 | 238 |
| 210 | 645341H1 | 21 | 220 |
| 210 | 645341R6 | 21 | 432 |
| 210 | 4551228H1 | 20 | 212 |
| 210 | 3182009H1 | 24 | 326 |
| 210 | 3182022H1 | 24 | 321 |
| 210 | 5156573H1 | 27 | 272 |
| 210 | 4800844H1 | 28 | 277 |
| 210 | 5864355H1 | 31 | 324 |
| 210 | 6219781H1 | 32 | 251 |
| 210 | 3375196H1 | 35 | 280 |
| 210 | 6306192H1 | 38 | 512 |
| 210 | g575091 | 38 | 316 |
| 210 | 2924014F6 | 38 | 385 |
| 210 | 2924014H1 | 38 | 247 |
| 210 | 2825826H1 | 56 | 355 |
| 210 | 3695750H1 | 62 | 182 |
| 210 | 941644R6 | 66 | 275 |
| 210 | 5310424H1 | 66 | 282 |
| 210 | 3580982H1 | 36 | 340 |
| 210 | 941644R1 | 66 | 365 |
| 210 | 5967756H1 | 70 | 570 |
| 210 | g831059 | 85 | 445 |
| 210 | 5727850H1 | 131 | 666 |
| 210 | 2053435H1 | 218 | 446 |
| 210 | g4682505 | 234 | 685 |
| 210 | 5507875R6 | 308 | 769 |
| 210 | 6874493H1 | 354 | 971 |
| 210 | g5109730 | 543 | 998 |
| 210 | g1391905 | 560 | 858 |
| 211 | 6409981H1 | 1 | 486 |

[0901] TABLE 5

| SEQ ID NO: | Template ID | Tissue Distribution |
|---|---|---|
| 1 | LG:1040582.1:2000FEB18 | Liver - 41%, Pancreas - 34%, Cardiovascular System - |
| | | 14% |
| 2 | LG:453570.1:2000FEB18 | Nervous System - 100% |
| 3 | LG:408751.3:2000FEB18 | Sense Organs - 63%, Nervous System - 22% |
| 4 | LI:090574.1:2000FEB01 | Nervous System - 46%, Unclassified/Mixed - 36% |
| 5 | LI:229932.2:2000FEB01 | Musculoskeletal System - 80% |
| 6 | LI:332176.1:2000FEB01 | Urinary Tract - 95% |
| 7 | LI:403248.2:2000FEB01 | Respiratory System - 60%, Hemic and Immune |
| | | System - 40% |
| 8 | LG:220992.1:2000MAY19 | Embryonic Structures - 17%, Male Genitalia - 12% |
| 9 | LG:1094571.1:2000MAY19 | Liver - 19%, Embryonic Structures - 16%, |
| | | Cardiovascular System - 14% |
| 10 | LI:350754.4:2000MAY01 | Skin - 47%, Stomatognathic System - 27%, Sense |
| | | Organs - 14% |
| 11 | LI:255828.29:2000MAY01 | Musculoskeletal System - 100% |
| 12 | LI:1190263.1:2000MAY01 | Urinary Tract - 80%, Urinary Tract - 15% |
| 13 | LG:270916.2:2000FEB18 | Female Genitalia - 100% |
| 14 | LG:999414.3:2000FEB18 | Embryonic Structures - 30%, Urinary Tract - 13%, |
| | | Digestive System - 11%, Musculoskeletal System - |
| | | 11% |
| 15 | LG:429446.1:2000FEB18 | Urinary Tract - 80%, Hemic and Immune System - |
| | | 20% |
| 16 | LI:057229.1:2000FEB01 | Male Genitalia - 71%, Hemic and Immune System - |
| | | 29% |
| 17 | LI:351965.1:2000FEB01 | Unclassified/Mixed - 53%, Male Genitalia - 12% |
| 18 | LG:068682.1:2000FEB18 | Unclassified/Mixed - 49%, Male Genitalia - 27% |
| 19 | LG:242665.1:2000FEB18 | Germ Cells - 47%, Female Genitalia - 13%, Male |
| | | Genitalia - 12% |
| 20 | LG:241743.1:2000FEB18 | Liver - 27%, Urinary Tract - 27%, Respiratory System - |
| | | 14% |
| 21 | LI:034212.1:2000FEB01 | Digestive System - 24%, Musculoskeletal System - |
| | | 22%, Nervous System - 11% |
| 22 | LG:344886.1:2000MAY19 | Germ Cells - 24%, Nervous System - 12% |
| 23 | LG:228930.1:2000MAY19 | Embryonic Structures - 43%, Nervous System - 29%, |
| | | Respiratory System - 14%, Hemic and Immune |
| | | System - 14% |
| 24 | LG:338927.1:2000MAY19 | Digestive System - 23%, Unclassified/Mixed - 21%, |
| | | Embryonic Structures - 19%, Hemic and Immune |
| | | System - 19% |
| 25 | LG:898771.1:2000MAY19 | Pancreas - 13%, Embryonic Structures - 11%, |
| | | Female Genitalia - 10%, Urinary Tract - 10%, Hemic |
| | | and Immune System - 10%, Cardiovascular System - |
| | | 10% |
| 26 | LI:257664.67:2000MAY01 | Hemic and Immune System - 100% |
| 27 | LI:001496.2:2000MAY01 | Endocrine System - 27%, Female Genitalia - 25%, |
| | | Embryonic Structures - 25% |
| 28 | LI:1085273.2:2000MAY01 | Digestive System - 29%, Skin - 24%, Endocrine |
| | | System - 16% |
| 29 | LI:333138.2:2000MAY01 | Exocrine Glands - 61%, Nervous System - 13%, |
| | | Nervous System - 11% |
| 30 | LI:338927.1:2000MAY01 | Embryonic Structures - 51%, Digestive System - 17% |
| 31 | LG:335558.1:2000FEB18 | Endocrine System - 45%, Nervous System - 18%, |
| | | Exocrine Glands - 11% |
| 32 | LG:998283.7:2000FEB18 | Sense Organs - 33%, Germ Cells - 18% |
| 33 | LI:402739.1:2000FEB01 | Unclassified/Mixed - 78%, Mate Genitalia - 11%, |
| | | Hemic and Immune System - 11% |
| 34 | LI:175223.1:2000FEB01 | Embryonic Structures - 99% |
| 35 | LG:981076.2:2000MAY19 | Endocrine System - 28%, Nervous System - 22%, |
| | | Respiratory System - 17%, Female Genitalia - 17%, |
| | | Hemic and Immune System - 17% |
| 36 | LI:1008973.1:2000MAY01 | Nervous System - 57%, Digestive System - 41% |
| 37 | LI:1190250.1:2000MAY01 | Female Genitalia - 48%, Respiratory System - 25% |
| 38 | LG:021371.3:2000FEB18 | Liver - 23%, Endocrine System - 17%, Hemic and |
| | | Immune System - 17% |
| 39 | LG:475404.1:2000FEB18 | Skin - 82% |
| 40 | LG:979406.2:2000FEB18 | Liver - 46%, Connective Tissue - 31%, Nervous |
| | | System - 15% |
| 41 | LG:410726.1:2000FEB18 | Embryonic Structures - 52%, Endocrine System - |
| | | 26% |
| 42 | LG:200005.1:2000FEB18 | Unclassified/Mixed - 26%, Cardiovascular System - |
| | | 14%, Female Genitalia - 13% |
| 43 | LG:1076828.1:2000FEB18 | Unclassified/Mixed - 69%, Urinary Tract - 25% |
| 44 | LG:1076931.1:2000FEB18 | Unclassified/Mixed - 63%, Musculoskeletal System - |
| | | 20%, Urinary Tract - 11% |
| 45 | LG:1078121.1:2000FEB18 | Female Genitalia - 75%, Nervous System - 25% |
| 46 | LG:1079203.1:2000FEB18 | Female Genitalia - 42%, Cardiovascular System - |
| | | 33%, Hemic and Immune System - 17% |
| 47 | LG:1082586.1:2000FEB18 | Respiratory System - 100% |
| 48 | LG:1082774.1:2000FEB18 | Respiratory System - 50%, Female Genitalia - 50% |
| 49 | LG:1082775.1:2000FEB18 | Female Genitalia - 75%, Nervous System - 25% |
| 50 | LG:1083120.1:2000FEB18 | Nervous System - 100% |
| 51 | LG:1087707.1:2000FEB18 | Stomatognathic System - 98% |
| 52 | LG:1090915.1:2000FEB18 | Embryonic Structures - 44%, Connective tissue - |
| | | 19% |
| 53 | LG:1094230.1:2000FEB18 | Female Genitalia - 100% |
| 54 | LG:474848.3:2000FEB18 | Connective Tissue - 44%, Exocrine Glands - 44%, |
| | | Hemic and Immune System - 11% |
| 55 | LI:251656.1:2000FEB01 | Nervous System - 38%, Digestive System - 38%, Male |
| | | Genitalia - 25% |
| 56 | LI:021371.1:2000FEB01 | Hemic and Immune System - 69%, Endocrine |
| | | System - 14% |
| 57 | LI:133095.1:2000FEB01 | Respiratory System - 67%, Nervous System - 13% |
| 58 | LI:236654.2:2000FEB01 | Unclassified/Mixed - 30%, Respiratory System - 19%, |
| | | Nervous System - 13%, Digestive System - 13% |
| 59 | LI:200009.1:2000FEB01 | Unclassified/Mixed - 37%, Urinary Tract - 16%, |
| | | Cardiovascular System - 15% |
| 60 | LI:758502.1:2000FEB01 | Unclassified/Mixed - 78%, Musculoskeletal System - |
| | | 22% |
| 61 | LI:344772.1:2000FEB01 | Nervous System - 56%, Skin - 27%, Connective Tissue - |
| | | 13% |
| 62 | LI:789445.1:2000FEB01 | Endocrine System - 100% |
| 63 | LI:789657.1:2000FEB01 | Urinary Tract - 31%, Female Genitalia - 19%, |
| | | Digestive System - 19%, Hemic and Immune System - |
| | | 19% |
| 64 | LI:789808.1:2000FEB01 | Exocrine Glands - 44%, Female Genitalia - 33%, |
| | | Nervous System - 22% |
| 65 | LI:792919.1:2000FEB01 | Respiratory System - 100% |
| 66 | LI:793949.1:2000FEB01 | Female Genitalia - 42%, Endocrine System - 19%, |
| | | Exocrine Glands - 13% |
| 67 | LI:794389.1:2000FEB01 | Endocrine System - 100% |
| 68 | LI:796010.1:2000FEB01 | Exocrine Glands - 100% |
| 69 | LI:796324.1:2000FEB01 | Female Genitalia - 100% |
| 70 | LI:796373.1:2000FEB01 | Respiratory System - 100% |
| 71 | LI:796415.1:2000FEB01 | Nervous System - 100% |
| 72 | LI:798636.1:2000FEB01 | Hemic and Immune System - 100% |
| 73 | LI:800045.1:2000FEB01 | Female Genitalia - 60%, Male Genitalia - 40% |
| 74 | LI:800680.1:2000FEB01 | Cardiovascular System - 100% |
| 75 | LI:800894.1:2000FEB01 | Respiratory System - 50%, Digestive System - 50% |
| 76 | LI:801015.1:2000FEB01 | Male Genitalia - 100% |
| 77 | LI:801236.1:2000FEB01 | Endocrine System - 100% |
| 78 | LI:803335.1:2000FEB01 | Connective Tissue - 100% |
| 79 | LI:803998.1:2000FEB01 | Nervous System - 38%, Digestive System - 38%, Male |
| | | Genitalia - 25% |
| 80 | LI:478757.1:2000FEB01 | Digestive System - 100% |
| 81 | LI:808532.1:2000FEB01 | Hemic and Immune System - 100% |
| 82 | LI:443073.1:2000FEB01 | Digestive System - 100% |
| 83 | LI:479671.1:2000FEB01 | Exocrine Glands - 80%, Hemic and Immune System - |
| | | 20% |
| 84 | LI:810078.1:2000FEB01 | Digestive System - 100% |
| 85 | LI:810224.1:2000FEB01 | Digestive System - 100% |
| 86 | LI:817052.2:2000FEB01 | Nervous System - 24%, Unclassified/Mixed - 18%, |
| | | Exocrine Glands - 14% |
| 87 | LG:892274.1:2000MAY19 | Embryonic Structures - 63%, Digestive System - 30% |
| 88 | LG:1080959.1:2000MAY19 | Digestive System - 40%, Respiratory System - 30%, |
| | | Hemic and Immune System - 30% |
| 89 | LG:1054900.1:2000MAY19 | Digestive System - 100% |
| 90 | LG:1077357.1:2000MAY19 | Nervous System - 38%, Female Genitalia - 38%, |
| | | Male Genitalia - 25% |
| 91 | LG:1084051.1:2000MAY19 | Pancreas - 31%, Digestive System - 22%, Hemic and |
| | | Immune System - 16% |
| 92 | LG:1076853.1:2000MAY19 | Female Genitalia - 23%, Unclassified/Mixed - 23%, |
| | | Cardiovascular System - 18%, Exocrine Glands - |
| | | 18% |
| 93 | LG:481631.10:2000MAY19 | Female Genitalia - 22%, Nervous System - 17%, |
| | | Exocrine Glands - 17%, Urinary Tract - 17% |
| 94 | LG:1088431.2:2000MAY19 | Exocrine Glands - 67%, Cardiovascular System - |
| | | 33% |
| 95 | LI:401619.10:2000MAY01 | Endocrine System - 18%, Embryonic Structures - |
| | | 16%, Pancreas - 15% |
| 96 | LI:1144007.1:2000MAY01 | Hemic and Immune System - 27%, Female |
| | | Genitalia - 13% |
| 97 | LI:331074.1:2000MAY01 | Endocrine System - 28%, Sense Organs - 22%, |
| | | Connective Tissue - 10% |
| 98 | LI:1170349.1:2000MAY01 | Endocrine System - 91% |
| 99 | LG:335097.1:2000FEB18 | Embryonic Structures - 24%, Musculoskeletal System - |
| | | 19%, Nervous System - 16% |
| 100 | LG:1076451.1:2000FEB18 | Nervous System - 100% |
| 101 | LI:805478.1:2000FEB01 | Skin - 100% |
| 102 | LG:101269.1:2000MAY19 | Endocrine System - 33%, Embryonic Structures - |
| | | 33%, Urinary Tract - 30% |
| 103 | LI:331087.1:2000MAY01 | Liver - 82%, Hemic and Immune System - 13% |
| 104 | LI:410188.1:2000MAY01 | Cardiovascular System - 81%, Cardiovascular |
| | | System - 12% |
| 105 | LI:1188288.1:2000MAY01 | Nervous System - 73% |
| 106 | LI:427997.4:2000MAY01 | Liver - 16%, Male Genitalia - 13%, Embryonic |
| | | Structures - 11% |
| 107 | LG:451682.1:2000FEB18 | Nervous System - 100% |
| 108 | LG:1077283.1:2000FEB18 | Liver - 86%, Hemic and Immune System - 14% |
| 109 | LG:481436.5:2000FEB18 | Embryonic Structures - 41%, Endocrine System - |
| | | 20%, Hemic and Immune System - 13% |
| 110 | LI:793701.1:2000FEB01 | Endocrine System - 43%, Urinary Tract - 36%, |
| | | Respiratory System - 21% |
| 111 | LI:373637.1:2000FEB01 | Germ Cells - 74%, Unclassified/Mixed - 16% |
| 112 | LG:239368.2:2000MAY19 | Digestive System - 43%, Male Genitalia - 24%, |
| | | Endocrine System - 24% |
| 113 | LI:053826.1:2000MAY01 | Germ Cells - 66%, Unclassified/Mixed - 22%, Male |
| | | Genitalia - 12% |
| 114 | LI:449393.1:2000MAY01 | Nervous System - 100% |
| 115 | LI:1071427.96:2000MAY01 | Stomatognathic System - 13% |
| 116 | LI:336338.8:2000MAY01 | Unclassified/Mixed - 55%, Connective Tissue - 26% |
| 117 | LG:345527.1:2000FEB18 | Urinary Tract - 24%, Hemic and Immune System - |
| | | 24%, Respiratory System - 18% |
| 118 | LG:1089383.1:2000FEB18 | Connective Tissue - 73%, Female Genitalia - 27% |
| 119 | LG:1092522.1:2000FEB18 | Female Genitalia - 38%, Exocrine Glands - 31%, |
| | | Male Genitalia - 15%, Hemic and Immune System - |
| | | 15% |
| 120 | LG:1093216.1:2000FEB18 | Urinary Tract - 100% |
| 121 | LI:270318.3:2000FEB01 | Embryonic Structures - 86%, Hemic and Immune |
| | | System - 14% |
| 122 | LI:335671.2:2000FEB01 | Unclassified/Mixed - 34%, Hemic and Immune |
| | | System - 20%, Urinary Tract - 17% |
| 123 | LI:793758.1:2000FEB01 | Nervous System - 62%, Urinary Tract - 38% |
| 124 | LI:803718.1:2000FEB01 | Female Genitalia - 100% |
| 125 | LI:412179.1:2000FEB01 | Endocrine System - 100% |
| 126 | LI:815679.1:2000FEB01 | Digestive System - 75% |
| 127 | LI:481361.3:2000FEB01 | Embryonic Structures - 28%, Skin - 20%, |
| | | Unclassified/Mixed - 16% |
| 128 | LG:247388.1:2000MAY19 | Cardiovascular System - 33%, Endocrine System - |
| | | 21%, Male Genitalia - 21% |
| 129 | LG:255789.10:2000MAY19 | Endocrine System - 56%, Urinary Tract - 44% |
| 130 | LI:787618.1:2000MAY01 | Endocrine System - 22%, Digestive System - 13%, |
| | | Endocrine System - 12% |
| 139 | LG:337818.2:2000FEB18 | Sense Organs - 18%, Nervous System - 11%, |
| | | Digestive System - 34%, Liver - 17%, Female |
| | | Genitalia - 11% |
| 140 | LI:337818.1:2000FEB01 | Digestive System - 27%, Liver - 19%, Female |
| | | Genitalia - 15% |
| 141 | LG:241577.4:2000MAY19 | Pancreas - 48%, Endocrine System - 24%, |
| | | Respiratory System - 14% |
| 142 | LG:344786.4:2000MAY19 | Respiratory System - 67%, Digestive System - 22%, |
| | | Nervous System - 11% |
| 143 | LI:414307.1:2000FEB01 | Endocrine System - 44%, Unclassified/Mixed - 17%, |
| | | Nervous System - 11% |
| 144 | LI:202943.2:2000FEB01 | Embryonic Structures - 100% |
| 145 | LI:246194.2:2000FEB01 | Germ Cells - 75%, Pancreas - 13% |
| 146 | LI:815961.1:2000FEB01 | Digestive System - 99% |
| 147 | LG:120744.1:2000MAY19 | Skin - 33%, Embryonic Structures - 21%, Digestive |
| | | System - 21% |
| 148 | LI:757520.1:2000MAY01 | Musculoskeletal System - 45%, Cardiovascular |
| | | System - 26%, Skin - 24% |
| 149 | LG:160570.1:2000FEB18 | Skin - 84%, Female Genitalia - 16% |
| 150 | LI:350398.3:2000FEB01 | Male Genitalia - 50%, Hemic and Immune System - |
| | | 50% |
| 151 | LI:221285.1:2000FEB01 | Endocrine System - 42%, Nervous System - 21% |
| 153 | LI:329017.1:2000FEB01 | Endocrine System - 62%, Unclassified/Mixed - 24% |
| 154 | LI:401322.1:2000FEB01 | Sense Organs - 44%, Liver - 22%, Skin - 14% |
| 155 | LG:403409.1:2000MAY19 | Respiratory System - 18%, Female Genitalia - 16%, |
| | | Cardiovascular System - 13% |
| 156 | LG:233933.5:2000MAY19 | Digestive System - 100% |
| 157 | LI:290344.1:2000MAY01 | Connective Tissue - 40%, Nervous System - 19%, |
| | | Embryonic Structures - 12% |
| 158 | LI:410742.1:2000MAY01 | Respiratory System - 47%, Skin - 42% |
| 159 | LG:406568.1:2000MAY19 | Stomatognathic System - 57%, Musculoskeletal |
| | | System - 21%, Cardiovascular System - 16% |
| 160 | LI:283762.1:2000MAY01 | Sense Organs - 25% |
| 161 | LI:347687.113:2000MAY01 | Nervous System - 45%, Nervous System - 38% |
| 162 | LI:1146510.1:2000MAY01 | Skin - 94% |
| 163 | LG:451710.1:2000FEB18 | Connective Tissue - 89%, Nervous System - 11% |
| 164 | LG:455771.1:2000FEB18 | Nervous System - 100% |
| 165 | LG:452089.1:2000FEB18 | Nervous System - 100% |
| 166 | LG:246415.1:2000FEB18 | Pancreas - 83%, Nervous System - 17% |
| 167 | LG:414144.10:2000FEB18 | Cardiovascular System - 17%, Connective Tissue - |
| | | 12% |
| 168 | LG:1101445.1:2000FEB18 | Liver - 91% |
| 169 | LG:452134.1:2000FEB18 | Hemic and Immune System - 64%, Male Genitalia - |
| | | 36% |
| 170 | LI:903021.1:2000FEB01 | Male Genitalia - 100% |
| 171 | LI:246422.1:2000FEB01 | Hemic and Immune System - 100% |
| 172 | LG:449404.1:2000MAY19 | Nervous System - 100% |
| 173 | LG:449413.1:2000MAY19 | Nervous System - 100% |
| 174 | LG:450105.1:2000MAY19 | Nervous System - 100% |
| 175 | LG:460809.1:2000MAY19 | Exocrine Glands - 100% |
| 176 | LG:481781.1:2000MAY19 | Nervous System - 100% |
| 177 | LG:1101153.1:2000MAY19 | Nervous System - 100% |
| 178 | LI:257695.20:2000MAY01 | Exocrine Glands - 28%, Endocrine System - 19%, |
| | | Nervous System - 16%, Digestive System - 16% |
| 179 | LI:455771.1:2000MAY01 | Nervous System - 100% |
| 180 | LI:274551.1:2000MAY01 | Nervous System - 60%, Hemic and Immune System - |
| | | 40% |
| 181 | LI:035973.1:2000MAY01 | Embryonic Structures - 58%, Digestive System - 26%, |
| | | Nervous System - 16% |
| 182 | LG:978427.5:2000FEB18 | Nervous System - 100% |
| 183 | LG:247781.2:2000FEB18 | Nervous System - 11% |
| 184 | LI:034583.1:2000FEB01 | Nervous System - 35%, Endocrine System - 35% |
| 185 | LI:333307.2:2000FEB01 | Cardiovascular System - 28%, Urinary Tract - 27%, |
| | | Musculoskeletal System - 17% |
| 186 | LI:814710.2:2000FEB01 | Respiratory System - 100% |
| 187 | LG:414732.1:2000MAY19 | Endocrine System - 82%, Nervous System - 18% |
| 188 | LG:413910.6:2000MAY19 | Connective Tissue - 55%, Nervous System - 15%, |
| | | Embryonic Structures - 13% |
| 189 | LI:414732.2:2000MAY01 | Endocrine System - 80%, Nervous System - 20% |
| 190 | LI:900264.2:2000MAY01 | Urinary Tract - 15%, Male Genitalia - 12% |
| 191 | LI:335593.1:2000MAY01 | Urinary Tract - 46%, Endocrine System - 17%, Germ |
| | | Cells - 14% |
| 192 | LI:1189543.1:2000MAY01 | Stomatognathic System - 35%, Digestive System - |
| | | 14% |
| 193 | LG:455450.1:2000FEB18 | Nervous System - 100% |
| 194 | LG:1040978.1:2000FEB18 | Nervous System - 100% |
| 195 | LG:446649.1:2000FEB18 | Liver - 80%, Hemic and Immune System - 13% |
| 196 | LG:132147.3:2000FEB18 | Unclassified/Mixed - 17%, Sense Organs - 16%, |
| | | Embryonic Structures - 10% |
| 197 | LI:036034.1:2000FEB01 | Nervous System - 80% |
| 198 | LG:162161.1:2000MAY19 | Unclassified/Mixed - 53%, Cardiovascular System - |
| | | 21%, Nervous System - 16% |
| 199 | LG:407214.10:2000MAY19 | Unclassified/Mixed - 40%, Respiratory System - 24%, |
| | | Cardiovascular System - 16% |
| 200 | LG:204626.1:2000MAY19 | Digestive System - 41%, Exocrine Glands - 24%, |
| | | Female Genitalia - 18% |
| 201 | LI:007401.1:2000MAY01 | Unclassified/Mixed - 31%, Nervous System - 25%, |
| | | Urinary Tract - 11% |
| 202 | LI:476342.1:2000MAY01 | Connective Tissue - 77%, Nervous System - 23% |
| 203 | LI:1072759.1:2000MAY01 | Hemic and Immune System - 27%, Musculoskeletal |
| | | System - 19%, Endocrine System - 11% |
| 204 | LG:998857.1:2000FEB18 | Digestive System - 58%, Pancreas - 12% |
| 205 | LG:482261.1:2000FEB18 | Male Genitalia - 85%, Respiratory System - 15% |
| 206 | LG:480328.1:2000FEB18 | Skin - 20%, Germ Cells - 18%, Female Genitalia - |
| | | 10% |
| 207 | LG:311197.1:2000MAY19 | Germ Cells - 44%, Digestive System - 15%, Male |
| | | Genitalia - 11% |
| 208 | LG:1054883.1:2000MAY19 | Endocrine System - 100% |
| 209 | LG:399395.1:2000MAY19 | Hemic and Immune System - 100% |
| 210 | LG:380497.2:2000MAY19 | Germ Cells - 23%, Exocrine Glands - 14%, |
| | | Connective Tissue - 13% |
| 211 | LI:272913.22:2000MAY01 | Female Genitalia - 100% |

[0902] TABLE 6

| SEQ | | | | | | | |
|---|---|---|---|---|---|---|---|
| ID | | | | | | Probability | |
| NO: | Frame | Length | Start | Stop | GI Number | Score | Annotation |
| 212 | 3 | 115 | 198 | 542 | g399660 | 3.00E−51 | aldehyde reductase [Rattus norvegicus] |
| 212 | 3 | 115 | 198 | 542 | g7677318 | 7.00E−51 | aldehyde reductase [Mus musculus] |
| 212 | 3 | 115 | 198 | 542 | g6013149 | 2.00E−48 | aldehyde reductase [Homo sapiens] |
| 213 | 3 | 161 | 3 | 485 | g2909424 | 2.00E−60 | Glyoxalase I [Cicer arietinum] |
| 213 | 3 | 161 | 3 | 485 | g2113825 | 2.00E−58 | Glyoxalase I [Brassica juncea] |
| 213 | 3 | 161 | 3 | 485 | g1177314 | 4.00E−57 | glyoxalase-I [Lycopersicon esculentum] |
| 214 | 2 | 332 | 2 | 997 | g8671168 | 0 | hypothetical protein [Homo sapiens] |
| 214 | 2 | 332 | 2 | 997 | g8886025 | 0 | collapsin response mediator protein-5 [Homo sapiens] |
| 214 | 2 | 332 | 2 | 997 | g8671360 | 1.00E−179 | Ulip-like protein [Rattus norvegicus] |
| 215 | 3 | 274 | 12 | 833 | g29600 | 2.00E−86 | carbonic anhydrase I (AA 1-261) [Homo sapiens] |
| 215 | 3 | 274 | 12 | 833 | g179793 | 2.00E−86 | carbonic anhydrase I (EC 4.2.1.1) [Homo sapiens] |
| 215 | 3 | 274 | 12 | 833 | g29587 | 4.00E−84 | carbonic anhydrase II (AA 1-260) [Homo sapiens] |
| 216 | 1 | 182 | 742 | 1287 | g10438188 | 1.00E−102 | unnamed protein product [Homo sapiens] |
| 216 | 1 | 182 | 742 | 1287 | g9949721 | 3.00E−49 | probable acetyl-coa synthetase [Pseudomonas aeruginosa] |
| 216 | 1 | 182 | 742 | 1287 | g9655831 | 7.00E−46 | prpE protein [Vibrio cholerae] |
| 217 | 2 | 359 | 2 | 1078 | g2104689 | 1.00E−111 | alpha glucosidase II, alpha subunit [Mus musculus] |
| 217 | 2 | 359 | 2 | 1078 | g7672977 | 1.00E−111 | glucosidase II alpha subunit [Homo sapiens] |
| 217 | 2 | 359 | 2 | 1078 | g577295 | 1.00E−110 | The ha1225 gene product is related to human alpha-glucosidase. [Homo |
| | | | | | | | sapiens] |
| 218 | 2 | 110 | 161 | 490 | g9653274 | 1.00E−26 | ornithine decarboxylase-2 [Xenopus laevis] |
| 218 | 2 | 110 | 161 | 490 | g200124 | 5.00E−18 | ornithine decarboxylase [Mus pahari] |
| 218 | 2 | 110 | 161 | 490 | g53518 | 1.00E−17 | ornithine decarboxylase [Mus musculus] |
| 219 | 3 | 549 | 36 | 1682 | g10435462 | 0 | unnamed protein product [Homo sapiens] |
| 219 | 3 | 549 | 36 | 1682 | g7023375 | 0 | unnamed protein product [Homo sapiens] |
| 219 | 3 | 549 | 36 | 1682 | g10433608 | 1.00E−164 | unnamed protein product [Homo sapiens] |
| 220 | 1 | 264 | 1 | 792 | g7023634 | 3.00E−92 | unnamed protein product [Homo sapiens] |
| 220 | 1 | 264 | 1 | 792 | g3213202 | 3.00E−49 | similarto C. elegans R10H10.6 and S. cerevisiae YD8419.03c [Drosophila |
| | | | | | | | melanogaster] |
| 220 | 1 | 264 | 1 | 792 | g7298960 | 3.00E−49 | CG2846 gene product [Drosophila melanogaster] |
| 221 | 3 | 701 | 33 | 2135 | g307504 | 0 | transglutaminase E3 [Homo sapiens] |
| 221 | 3 | 701 | 33 | 2135 | g4467804 | 0 | TGM3 (PROTEIN-GLUTAMINE GLUTAMYLTRANSFERASE E3 |
| | | | | | | | PRECURSOR (EC 2.3.2.13) (TGASE E3) (TRANSGLUTAMINASE 3).) [Homo |
| | | | | | | | sapiens] |
| 221 | 3 | 701 | 33 | 2135 | g309521 | 0 | transglutaminase E3 [Mus musculus] |
| 222 | 2 | 150 | 2 | 451 | g35505 | 7.00E−65 | pyruvate kinase [Homo sapiens] |
| 222 | 2 | 150 | 2 | 451 | g189998 | 7.00E−65 | M2-type pyruvate kinase [Homo sapiens] |
| 222 | 2 | 150 | 2 | 451 | g2623945 | 3.00E−64 | pyruvate kinase; ATP: pyruvate 2-o-phosphotransferase [Oryctolagus |
| | | | | | | | cuniculus] |
| 223 | 2 | 234 | 866 | 1567 | g2576305 | 1.00E−128 | arylsulphatase [Homo sapiens] |
| 223 | 2 | 234 | 866 | 1567 | g791002 | 3.00E−82 | ARSD [Homo sapiens] |
| 223 | 2 | 234 | 866 | 1567 | g791004 | 4.00E−75 | ARSE [Homo sapiens] |
| 224 | 2 | 86 | 2 | 259 | | | |
| 225 | 2 | 173 | 1049 | 1567 | g4092820 | 8.00E−62 | BC319430_7 [Homo sapiens] |
| 225 | 2 | 173 | 1049 | 1567 | g2792016 | 2.00E−54 | olfactory receptor [Homo sapiens] |
| 225 | 2 | 173 | 1049 | 1567 | g4092819 | 2.00E−54 | BC319430_5 [Homo sapiens] |
| 226 | 2 | 68 | 86 | 289 | g8272468 | 4.00E−15 | envelope protein [Homo sapiens] |
| 226 | 2 | 68 | 86 | 289 | g4773880 | 4.00E−15 | envelope protein precursor [Homo sapiens] |
| 226 | 2 | 68 | 86 | 289 | g4262296 | 4.00E−15 | envelope protein [Homo sapiens] |
| 227 | 1 | 70 | 79 | 288 | g11231093 | 1.00E−11 | hypothetical protein [Macaca fascicularis] |
| 227 | 1 | 70 | 79 | 288 | g10435559 | 3.00E−10 | unnamed protein product [Homo sapiens] |
| 227 | 1 | 70 | 79 | 288 | g7020625 | 2.00E−09 | unnamed protein product [Homo sapiens] |
| 228 | 2 | 117 | 836 | 1186 | g5726235 | 3.00E−18 | unknown protein U5/2 [multiple sclerosis associated retrovirus element] |
| 229 | 2 | 294 | 2 | 883 | g404634 | 1.00E−59 | serine/threonine kinase [Mus musculus] |
| 229 | 2 | 294 | 2 | 883 | g2738898 | 3.00E−59 | protein kinase [Mus musculus] |
| 229 | 2 | 294 | 2 | 883 | g8101585 | 2.00E−54 | testis specific serine kinase-3 [Mus musculus] |
| 230 | 1 | 326 | 1 | 978 | g2117166 | 1.00E−160 | Ras like GTPase [Homo sapiens] |
| 230 | 1 | 326 | 1 | 978 | g466271 | 1.00E−140 | Rar protein [Homo sapiens] |
| 230 | 1 | 326 | 1 | 978 | g3036779 | 1.00E−102 | match: multiple proteins; RAR (RAS like GTPASE) like [Homo sapiens] |
| 231 | 1 | 182 | 40 | 585 | g5763838 | 1.00E−66 | dJ593C16.1 (ras GTPase activating protein) [Homo sapiens] |
| 231 | 1 | 182 | 40 | 585 | g4417207 | 1.00E−66 | synGAP-d [Rattus norvegicus] |
| 231 | 1 | 182 | 40 | 585 | g4105589 | 1.00E−66 | nGAP [Homo sapiens] |
| 232 | 1 | 358 | 58 | 1131 | g1469876 | 1.00E−103 | The KIAA0147 gene product is related to adenylyl cyclase. [Homo sapiens] |
| 232 | 1 | 358 | 58 | 1131 | g6850952 | 1.00E−86 | vartul-2 protein [Drosophila melanogaster] |
| 232 | 1 | 358 | 58 | 1131 | g6782322 | 1.00E−86 | Vartul-1 protein [Drosophila melanogaster] |
| 233 | 1 | 194 | 370 | 951 | g7008402 | 1.00E−107 | kappa B-ras 1 [Homo sapiens] |
| 233 | 1 | 194 | 370 | 951 | g7239257 | 1.00E−103 | kappaB-Ras 1 [Mus musculus] |
| 233 | 1 | 194 | 370 | 951 | g7008404 | 8.00E−75 | kappa B-ras 2 [Homo sapiens] |
| 234 | 2 | 222 | 17 | 682 | g9368448 | 1.00E−111 | phospholipase C-beta-1a [Homo sapiens] |
| 234 | 2 | 222 | 17 | 682 | g9368450 | 1.00E−111 | phospholipase C-beta-1b [Homo sapiens] |
| 234 | 2 | 222 | 17 | 682 | g206218 | 1.00E−110 | phospholipase C-1 [Rattus sp.] |
| 235 | 3 | 185 | 126 | 680 | g3599940 | 1.00E−57 | faciogenital dysplasia protein 2 [Mus musculus] |
| 235 | 3 | 185 | 126 | 680 | g10440426 | 8.00E−42 | FLJ00048 protein [Homo sapiens] |
| 235 | 3 | 185 | 126 | 680 | g595425 | 4.00E−20 | FGD1 [Homo sapiens] |
| 236 | 2 | 192 | 707 | 1282 | | | |
| 237 | 3 | 61 | 204 | 386 | | | |
| 238 | 2 | 335 | 17 | 1021 | g3005085 | 2.00E−92 | hook1 protein [Homo sapiens] |
| 238 | 2 | 335 | 17 | 1021 | g5706448 | 2.00E−92 | dJ782L23.1 (HOOK1) [Homo sapiens] |
| 238 | 2 | 335 | 17 | 1021 | g3005087 | 2.00E−70 | hook2 protein [Homo sapiens] |
| 239 | 1 | 346 | 1261 | 2298 | g1109782 | 1.00E−105 | protein-tyrosine phosphatase [Homo sapiens] |
| 239 | 1 | 346 | 1261 | 2298 | g1781037 | 1.00E−76 | neuronal tyrosine threonine phosphatase 1 [Mus musculus] |
| 239 | 1 | 346 | 1261 | 2298 | g10241798 | 5.00E−11 | hypothetical protein SCE41.24c [Streptomyces coelicolor] |
| 240 | 3 | 298 | 147 | 1040 | g4678722 | 1.00E−156 | hypothetical protein [Homo sapiens] |
| 240 | 3 | 298 | 147 | 1040 | g4007153 | 1.00E−153 | dJ272L16.1 (Rat Ca2+/Calmodulin dependent Protein Kinase LIKE protein) |
| | | | | | | | [Homo sapiens] |
| 240 | 3 | 298 | 147 | 1040 | g2077934 | 1.00E−152 | Protein Kinase [Rattus norvegicus] |
| 241 | 1 | 133 | 133 | 531 | g10440426 | 1.00E−34 | FLJ00048 protein [Homo sapiens] |
| 241 | 1 | 133 | 133 | 531 | g3599940 | 2.00E−16 | faciogenital dysplasia protein 2 [Mus musculus] |
| 242 | 2 | 354 | 821 | 1882 | g11907572 | 1.00E−143 | TSC22-related inducible leucine zipper 1b [Mus musculus] |
| 242 | 2 | 354 | 821 | 1882 | g1181619 | 1.00E−106 | a variant of TSC-22 [Gallus gallus] |
| 242 | 2 | 354 | 821 | 1882 | g3327152 | 9.00E−16 | KIAA0669 protein [Homo sapiens] |
| 243 | 1 | 237 | 1 | 711 | g6683492 | 1.00E−105 | bromodomain PHD finger transcription factor [Homo sapiens] |
| 243 | 1 | 237 | 1 | 711 | g3876452 | 9.00E−53 | contains similarity to Pfam domain: PF00439 (Bromodomain), Score = 125.5, E- |
| | | | | | | | value = 1.5e−35, N = 1; PF00628 (PHD-finger), Score = 102.0, |
| | | | | | | | E-value =3.8e−27, N = 2 [Caenorhabditis elegans] |
| 243 | 1 | 237 | 1 | 711 | g3876449 | 9.00E−53 | predicted using Genefinder˜contains similarity to Pfam domain: PF00439 |
| | | | | | | | (Bromodomain), Score = 125.5, E-value = 1.5e−35, N = 1; PF00628 |
| | | | | | | | (PHD-finger), Score = 102.0, E-value = 3.8e−27, N = 2 [Caenorhabditis elegans] |
| 244 | 1 | 161 | 1 | 483 | g6330736 | 1.00E−42 | KIAA1234 protein [Homo sapiens] |
| 244 | 1 | 161 | 1 | 483 | g11244871 | 1.00E−40 | dioxin receptor repressor [Homo sapiens] |
| 244 | 1 | 161 | 1 | 483 | g4164151 | 4.00E−35 | AhR repressor [Mus musculus] |
| 245 | 3 | 151 | 54 | 506 | g10433955 | 9.00E−44 | unnamed protein product [Homo sapiens] |
| 245 | 3 | 151 | 54 | 506 | g7295442 | 1.00E−16 | CG17334 gene product [Drosophila melanogaster] |
| 245 | 3 | 151 | 54 | 506 | g2745892 | 1.00E−12 | Y box transcription factor [Mus musculus] |
| 246 | 2 | 160 | 173 | 652 | g3924670 | 4.00E−68 | supported by Genscan and several ESTs: C83049 (NID: g3062006), |
| | | | | | | | AA823760 (NID: g2893628), AA215791 (NID: g1815572), AI095488 |
| | | | | | | | (NID: g3434464), and AA969095 (NID: g3144275) [Homo sapiens] |
| 246 | 2 | 160 | 173 | 652 | g5640105 | 2.00E−59 | homeobox protein LSX [Homo sapiens] |
| 246 | 2 | 160 | 173 | 652 | g6523391 | 6.00E−59 | phtf protein [Mus musculus] |
| 247 | 3 | 160 | 108 | 587 | g6939732 | 1.00E−52 | transcription factor Elongin A2 [Homo sapiens] |
| 247 | 3 | 160 | 108 | 587 | g4581412 | 1.00E−29 | dJ886K2.1 (elongin A; RNA polymerase; RNA polymerase II; RNA polymerase |
| | | | | | | | II elongation factor.) [Homo sapiens] |
| 247 | 3 | 160 | 108 | 587 | g992563 | 1.00E−29 | elongin A [Homo sapiens] |
| 248 | 1 | 171 | 25 | 537 | g11907923 | 4.00E−29 | enhancer of polycomb [Homo sapiens] |
| 248 | 1 | 171 | 25 | 537 | g3757890 | 3.00E−18 | enhancer of polycomb [Drosophila melanogaster] |
| 248 | 1 | 171 | 25 | 537 | g7303589 | 3.00E−18 | E(Pc) gene product [Drosophila melanogaster] |
| 249 | 2 | 449 | 266 | 1612 | g10443047 | 0 | bA465L10.2 (novel C2H2 type zinc finger protein similar to chicken FZF-1) |
| | | | | | | | [Homo sapiens] |
| 249 | 2 | 449 | 266 | 1612 | g10438918 | 0 | unnamed protein product [Homo sapiens] |
| 249 | 2 | 449 | 266 | 1612 | g984814 | 8.00E−98 | zinc finger protein [Gallus gallus] |
| 250 | 2 | 127 | 140 | 520 | g10434195 | 2.00E−64 | unnamed protein product [Homo sapiens] |
| 250 | 2 | 127 | 140 | 520 | g6467206 | 3.00E−36 | gonadotropin inducible transcription repressor-4 [Homo sapiens] |
| 250 | 2 | 127 | 140 | 520 | g6330394 | 4.00E−34 | KIAA1198 protein [Homo sapiens] |
| 251 | 1 | 157 | 1 | 471 | g340446 | 2.00E−17 | zinc finger protein 7 (ZFP7) [Homo sapiens] |
| 251 | 1 | 157 | 1 | 471 | g4325310 | 2.00E−17 | zinc-finger protein 7 [Homo sapiens] |
| 251 | 1 | 157 | 1 | 471 | g6007771 | 5.00E−17 | KID2 [Mus musculus] |
| 252 | 1 | 305 | 145 | 1059 | g6002480 | 3.00E−49 | BWSCR2 associated zinc-finger protein BAZ2 [Homo sapiens] |
| 252 | 1 | 305 | 145 | 1059 | g9963806 | 3.00E−47 | zinc finger protein ZNF287 [Homo sapiens] |
| 252 | 1 | 305 | 145 | 1059 | g11527849 | 8.00E−43 | zinc finger protein SKAT2 [Mus musculus] |
| 253 | 2 | 717 | 305 | 2455 | g10047335 | 0 | KIAA1629 protein [Homo sapiens] |
| 253 | 2 | 717 | 305 | 2455 | g1504006 | 1.00E−96 | similar to human ZFY protein. [Homo sapiens] |
| 253 | 2 | 717 | 305 | 2455 | g7243280 | 4.00E−66 | KIAA1441 protein [Homo sapiens] |
| 254 | 1 | 211 | 1 | 633 | g10047183 | 3.00E−49 | KIAA1559 protein [Homo sapiens] |
| 254 | 1 | 211 | 1 | 633 | g5080758 | 2.00E−45 | BC331191_1 [Homo sapiens] |
| 254 | 1 | 211 | 1 | 633 | g498721 | 3.00E−44 | zinc finger protein [Homo sapiens] |
| 255 | 2 | 103 | 2 | 310 | g498152 | 2.00E−20 | ha0946 protein is Kruppel-related. [Homo sapiens] |
| 255 | 2 | 103 | 2 | 310 | g7576272 | 2.00E−20 | bA393J16.1 (zinc finger protein 33a (KOX 31)) [Homo sapiens] |
| 255 | 2 | 103 | 2 | 310 | g10440081 | 2.00E−19 | unnamed protein product [Homo sapiens] |
| 256 | 3 | 84 | 135 | 386 | g347906 | 2.00E−26 | zinc finger protein [Homo sapiens] |
| 256 | 3 | 84 | 135 | 386 | g3342002 | 1.00E−25 | hematopoietic cell derived zinc finger protein [Homo sapiens] |
| 256 | 3 | 84 | 135 | 386 | g8163824 | 5.00E−25 | krueppel-like zinc finger protein HZF2 [Homo sapiens] |
| 257 | 1 | 194 | 103 | 684 | g10435738 | 4.00E−74 | unnamed protein product [Homo sapiens] |
| 257 | 1 | 194 | 103 | 684 | g1017722 | 8.00E−73 | repressor transcriptional factor [Homo sapiens] |
| 257 | 1 | 194 | 103 | 684 | g7959207 | 3.00E−71 | KIAA1473 protein [Homo sapiens] |
| 258 | 1 | 129 | 28 | 414 | g2072955 | 6.00E−07 | p40 [Homo sapiens] |
| 258 | 1 | 129 | 28 | 414 | g483915 | 8.00E−07 | ORF1, encodes a 40 kDa product [Homo sapiens] |
| 258 | 1 | 129 | 28 | 414 | g339776 | 8.00E−07 | ORF1 codes for a 40 kDa product [Homo sapiens] |
| 259 | 3 | 93 | 75 | 353 | g3329372 | 4.00E−36 | DNA-binding protein [Homo sapiens] |
| 259 | 3 | 93 | 75 | 353 | g7959207 | 1.00E−33 | KIAA1473 protein [Homo sapiens] |
| 259 | 3 | 93 | 75 | 353 | g184452 | 3.00E−33 | Krueppel-related DNA-binding protein [Homo sapiens] |
| 260 | 3 | 193 | 369 | 947 | g8099348 | 1.00E−38 | zinc finger protein [Homo sapiens] |
| 260 | 3 | 193 | 369 | 947 | g5730196 | 2.00E−38 | Kruppel-type zinc finger [Homo sapiens] |
| 260 | 3 | 193 | 369 | 947 | g8050899 | 4.00E−38 | ZNF180 [Homo sapiens] |
| 261 | 3 | 111 | 3 | 335 | g7023216 | 1.00E−14 | unnamed protein product [Homo sapiens] |
| 261 | 3 | 111 | 3 | 335 | g3406676 | 6.00E−14 | zinc finger protein 54 [Mus musculus] |
| 261 | 3 | 111 | 3 | 335 | g9802037 | 3.00E−13 | zinc finger protein SBZF3 [Homo sapiens] |
| 262 | 3 | 137 | 75 | 485 | g186774 | 1.00E−26 | zinc finger protein [Homo sapiens] |
| 262 | 3 | 137 | 75 | 485 | g2384653 | 6.00E−26 | Krueppel family zinc finger protein [Homo sapiens] |
| 262 | 3 | 137 | 75 | 485 | g8163824 | 6.00E−26 | krueppel-like zinc finger protein HZF2 [Homo sapiens] |
| 263 | 3 | 68 | 51 | 254 | g7239109 | 2.00E−15 | HSPC059 [Homo sapiens] |
| 263 | 3 | 68 | 51 | 254 | g347906 | 4.00E−15 | zinc finger protein [Homo sapiens] |
| 263 | 3 | 68 | 51 | 254 | g7023216 | 2.00E−14 | unnamed protein product [Homo sapiens] |
| 264 | 3 | 101 | 90 | 392 | g3329372 | 8.00E−35 | DNA-binding protein [Homo sapiens] |
| 264 | 3 | 101 | 90 | 392 | g4559318 | 7.00E−32 | BC273239_1 [Homo sapiens] |
| 264 | 3 | 101 | 90 | 392 | g184452 | 9.00E−32 | Krueppel-related DNA-binding protein [Homo sapiens] |
| 265 | 1 | 96 | 184 | 471 | g4589588 | 5.00E−22 | KIAA0972 protein [Homo sapiens] |
| 265 | 1 | 96 | 184 | 471 | g4514561 | 6.00E−22 | KRAB-containing zinc-finger protein KRAZ2 [Mus musculus] |
| 265 | 1 | 96 | 184 | 471 | g7576272 | 2.00E−21 | bA393J16.1 (zinc finger protein 33a (KOX 31)) [Homo sapiens] |
| 266 | 2 | 251 | 2 | 754 | g55471 | 1.00E−134 | Zfp-29 [Mus musculus] |
| 266 | 2 | 251 | 2 | 754 | g1020145 | 3.00E−73 | DNA binding protein [Homo sapiens] |
| 266 | 2 | 251 | 2 | 754 | g6002478 | 3.00E−72 | BWSCR2 associated zinc-finger protein BAZ1 [Homo sapiens] |
| 267 | 3 | 522 | 36 | 1601 | g10443047 | 0 | bA465L10.2 (novel C2H2 type zinc finger protein similar to chicken FZF-1) |
| | | | | | | | [Homo sapiens] |
| 267 | 3 | 522 | 36 | 1601 | g10438918 | 0 | unnamed protein product [Homo sapiens] |
| 267 | 3 | 522 | 36 | 1601 | g984814 | 2.00E−97 | zinc finger protein [Gallus gallus] |
| 268 | 2 | 267 | 2 | 802 | g9886891 | 4.00E−45 | zinc finger protein 276 C2H2 type [Mus musculus] |
| 268 | 2 | 267 | 2 | 802 | g11611571 | 3.00E−43 | hypothetical protein [Macaca fascicularis] |
| 268 | 2 | 267 | 2 | 802 | g453376 | 4.00E−43 | zinc finger protein PZF [Mus musculus] |
| 269 | 2 | 286 | 2 | 859 | g2754696 | 9.00E−08 | high molecular mass nuclear antigen [Gallus gallus] |
| 269 | 2 | 286 | 2 | 859 | g2078483 | 9.00E−06 | antifreeze glycopeptide AFGP polyprotein precursor [Boreogadus saida] |
| 270 | 3 | 194 | 270 | 851 | g8575782 | 1.00E−112 | PR-domain zinc finger protein 6 isoform A; PR-domain family protein 3 isoform |
| | | | | | | | A; PRDM6A; PFM3A [Homo sapiens] |
| 270 | 3 | 194 | 270 | 851 | g10437767 | 1.00E−26 | unnamed protein product [Homo sapiens] |
| 270 | 3 | 194 | 270 | 851 | g7295698 | 9.00E−26 | CG15436 gene product [Drosophila melanogaster] |
| 271 | 3 | 263 | 3 | 791 | g6409345 | 1.00E−107 | zinc finger protein ZNF180 [Homo sapiens] |
| 271 | 3 | 263 | 3 | 791 | g8050899 | 1.00E−107 | ZNF180 [Homo sapiens] |
| 271 | 3 | 263 | 3 | 791 | g200407 | 1.00E−101 | pMLZ-4 [Mus musculus] |
| 272 | 2 | 142 | 290 | 715 | g4062983 | 5.00E−65 | Eos protein [Mus musculus] |
| 272 | 2 | 142 | 290 | 715 | g9408382 | 4.00E−46 | eos [Raja eglanteria] |
| 272 | 2 | 142 | 290 | 715 | g11612390 | 3.00E−42 | zinc finger transcription factor Eos [Homo sapiens] |
| 273 | 2 | 164 | 2 | 493 | g1049301 | 3.00E−25 | KRAB zinc finger protein; Method: conceptual translation supplied by author |
| | | | | | | | [Homo sapiens] |
| 273 | 2 | 164 | 2 | 493 | g10047251 | 9.00E−25 | KIAA1588 protein [Homo sapiens] |
| 273 | 2 | 164 | 2 | 493 | g8809810 | 1.00E−19 | KRAB zinc finger protein [Mus musculus] |
| 274 | 2 | 107 | 509 | 829 | g1237278 | 2.00E−36 | zinc finger protein [Cavia porcellus] |
| 274 | 2 | 107 | 509 | 829 | g7023417 | 4.00E−36 | unnamed protein product [Homo sapiens] |
| 274 | 2 | 107 | 509 | 829 | g11917507 | 5.00E−36 | HPF1 protein [Homo sapiens] |
| 275 | 3 | 105 | 336 | 650 | g9801232 | 2.00E−51 | bA508N22.2 (zinc finger protein 37a (KOX 21)) [Homo sapiens] |
| 275 | 3 | 105 | 336 | 650 | g829151 | 2.00E−51 | ZNF37A [Homo sapiens] |
| 275 | 3 | 105 | 336 | 650 | g5730196 | 4.00E−36 | Kruppel-type zinc finger [Homo sapiens] |
| 276 | 1 | 149 | 1 | 447 | g7656698 | 3.00E−91 | Zinc finger protein 222 [Homo sapiens] |
| 276 | 1 | 149 | 1 | 447 | g6118381 | 3.00E−91 | zinc finger protein ZNF222 [Homo sapiens] |
| 276 | 1 | 149 | 1 | 447 | g6118383 | 1.00E−81 | zinc finger protein ZNF223 [Homo sapiens] |
| 277 | 3 | 101 | 90 | 392 | g3329372 | 1.00E−30 | DNA-binding protein [Homo sapiens] |
| 277 | 3 | 101 | 90 | 392 | g4559318 | 3.00E−29 | BC273239_1 [Homo sapiens] |
| 277 | 3 | 101 | 90 | 392 | g1124876 | 5.00E−29 | Krueppel-related DNA-binding protein [Homo sapiens] |
| 278 | 3 | 137 | 6 | 416 | g11062533 | 2.00E−46 | bA245E14.1 (novel zinc finger protein similar to ZFP47) [Homo sapiens] |
| 278 | 3 | 137 | 6 | 416 | g5640017 | 2.00E−46 | zinc finger protein ZFP113 [Mus musculus] |
| 278 | 3 | 137 | 6 | 416 | g186774 | 5.00E−46 | zinc finger protein [Homo sapiens] |
| 279 | 3 | 97 | 165 | 455 | g829151 | 2.00E−27 | ZNF37A [Homo sapiens] |
| 279 | 3 | 97 | 165 | 455 | g9801232 | 2.00E−27 | bA508N22.2 (zinc finger protein 37a (KOX 21)) [Homo sapiens] |
| 279 | 3 | 97 | 165 | 455 | g3702137 | 9.00E−20 | dJ733D15.1 (Zinc-finger protein) [Homo sapiens] |
| 280 | 2 | 97 | 182 | 472 | g9801232 | 4.00E−29 | bA508N22.2 (zinc finger protein 37a (KOX 21)) [Homo sapiens] |
| 280 | 2 | 97 | 182 | 472 | g829151 | 4.00E−29 | ZNF37A [Homo sapiens] |
| 280 | 2 | 97 | 182 | 472 | g200407 | 4.00E−21 | pMLZ-4 [Mus musculus] |
| 281 | 1 | 179 | 31 | 567 | g10442700 | 3.00E−61 | zinc-finger protein ZBRK1 [Homo sapiens] |
| 281 | 1 | 179 | 31 | 567 | g10435411 | 3.00E−61 | unnamed protein product [Homo sapiens] |
| 281 | 1 | 179 | 31 | 567 | g10954044 | 3.00E−61 | KRAB zinc finger protein ZFQR [Homo sapiens] |
| 282 | 3 | 87 | 369 | 629 | g8099348 | 2.00E−14 | zinc finger protein [Homo sapiens] |
| 282 | 3 | 87 | 369 | 629 | g498725 | 2.00E−14 | zinc finger protein [Homo sapiens] |
| 282 | 3 | 87 | 369 | 629 | g495568 | 2.00E−13 | zinc finger protein [Homo sapiens] |
| 283 | 2 | 172 | 2 | 517 | g6007771 | 4.00E−97 | KID2 [Mus musculus] |
| 283 | 2 | 172 | 2 | 517 | g2970038 | 2.00E−93 | HKL1 [Homo sapiens] |
| 283 | 2 | 172 | 2 | 517 | g205067 | 2.00E−93 | zinc finger protein [Rattus norvegicus] |
| 284 | 1 | 151 | 1 | 453 | g1806134 | 5.00E−57 | zinc finger protein [Mus musculus] |
| 284 | 1 | 151 | 1 | 453 | g538413 | 5.00E−57 | zinc finger protein [Mus musculus] |
| 284 | 1 | 151 | 1 | 453 | g186774 | 3.00E−55 | zinc finger protein [Homo sapiens] |
| 285 | 2 | 89 | 83 | 349 | g7023216 | 2.00E−18 | unnamed protein product [Homo sapiens] |
| 285 | 2 | 89 | 83 | 349 | g9802037 | 4.00E−16 | zinc finger protein SBZF3 [Homo sapiens] |
| 285 | 2 | 89 | 83 | 349 | g7239109 | 7.00E−15 | HSPC059 [Homo sapiens] |
| 286 | 2 | 146 | 62 | 499 | g2739353 | 7.00E−56 | ZNF91L [Homo sapiens] |
| 286 | 2 | 146 | 62 | 499 | g7959207 | 5.00E−50 | KIAA1473 protein [Homo sapiens] |
| 286 | 2 | 146 | 62 | 499 | g3342002 | 7.00E−50 | hematopoietic cell derived zinc finger protein [Homo sapiens] |
| 287 | 1 | 78 | 1 | 234 | g487785 | 4.00E−16 | zinc finger protein ZNF136 [Homo sapiens] |
| 287 | 1 | 78 | 1 | 234 | g5262560 | 7.00E−15 | hypothetical protein [Homo sapiens] |
| 287 | 1 | 78 | 1 | 234 | g10434856 | 9.00E−15 | unnamed protein product [Homo sapiens] |
| 288 | 3 | 126 | 78 | 455 | g9963804 | 4.00E−47 | zinc finger protein ZNF286 [Homo sapiens] |
| 288 | 3 | 126 | 78 | 455 | g5640017 | 2.00E−46 | zinc finger protein ZFP113 [Mus musculus] |
| 288 | 3 | 126 | 78 | 455 | g7020166 | 4.00E−46 | unnamed protein product [Homo sapiens] |
| 289 | 1 | 96 | 151 | 438 | g4589588 | 5.00E−22 | KIAA0972 protein [Homo sapiens] |
| 289 | 1 | 96 | 151 | 438 | g4514561 | 6.00E−22 | KRAB-containing zinc-finger protein KRAZ2 [Mus musculus] |
| 289 | 1 | 96 | 151 | 438 | g7576272 | 2.00E−21 | bA393J16.1 (zinc finger protein 33a (KOX 31)) [Homo sapiens] |
| 290 | 1 | 149 | 118 | 564 | g7959207 | 1.00E−26 | KIAA1473 protein [Homo sapiens] |
| 290 | 1 | 149 | 118 | 564 | g498736 | 3.00E−26 | zinc finger protein [Homo sapiens] |
| 290 | 1 | 149 | 118 | 564 | g4454678 | 4.00E−23 | zinc finger protein 4 [Homo sapiens] |
| 291 | 2 | 134 | 152 | 553 | g498152 | 1.00E−06 | ha0946 protein is Kruppel-related. [Homo sapiens] |
| 291 | 2 | 134 | 152 | 553 | g10440081 | 1.00E−06 | unnamed protein product [Homo sapiens] |
| 291 | 2 | 134 | 152 | 553 | g7576272 | 1.00E−06 | bA393J16.1 (zinc finger protein 33a (KOX 31)) [Homo sapiens] |
| 292 | 2 | 212 | 2 | 637 | g7656698 | 1.00E−133 | Zinc finger protein 222 [Homo sapiens] |
| 292 | 2 | 212 | 2 | 637 | g6118381 | 1.00E−133 | zinc finger protein ZNF222 [Homo sapiens] |
| 292 | 2 | 212 | 2 | 637 | g6118383 | 1.00E−122 | zinc finger protein ZNF223 [Homo sapiens] |
| 293 | 2 | 108 | 2 | 325 | g4567179 | 2.00E−33 | BC37295_1 [Homo sapiens] |
| 293 | 2 | 108 | 2 | 325 | g10434142 | 9.00E−31 | unnamed protein product [Homo sapiens] |
| 293 | 2 | 108 | 2 | 325 | g5817149 | 9.00E−31 | hypothetical protein [Homo sapiens] |
| 294 | 1 | 83 | 97 | 345 | g930123 | 9.00E−24 | zinc finger protein (583 AA) [Homo sapiens] |
| 294 | 1 | 83 | 97 | 345 | g487785 | 8.00E−23 | zinc finger protein ZNF136 [Homo sapiens] |
| 294 | 1 | 83 | 97 | 345 | g5262560 | 1.00E−22 | hypothetical protein [Homo sapiens] |
| 295 | 1 | 180 | 1 | 540 | g498719 | 2.00E−83 | zinc finger protein [Homo sapiens] |
| 295 | 1 | 180 | 1 | 540 | g3953593 | 3.00E−69 | Zinc finger protein s11-6 [Mus musculus] |
| 295 | 1 | 180 | 1 | 540 | g6467206 | 4.00E−68 | gonadotropin inducible transcription repressor-4 [Homo sapiens] |
| 296 | 3 | 97 | 57 | 347 | g9801232 | 3.00E−28 | bA508N22.2 (zinc finger protein 37a (KOX 21)) [Homo sapiens] |
| 296 | 3 | 97 | 57 | 347 | g829151 | 3.00E−28 | ZNF37A [Homo sapiens] |
| 296 | 3 | 97 | 57 | 347 | g881564 | 4.00E−20 | ZNF157 [Homo sapiens] |
| 297 | 1 | 217 | 421 | 1071 | g6331377 | 1.00E−131 | KIAA1285 protein [Homo sapiens] |
| 297 | 1 | 217 | 421 | 1071 | g1020145 | 6.00E−53 | DNA binding protein [Homo sapiens] |
| 297 | 1 | 217 | 421 | 1071 | g2224593 | 1.00E−52 | KIAA0326 [Homo sapiens] |
| 298 | 3 | 137 | 15 | 425 | g4456989 | 4.00E−20 | protease [Homo sapiens] |
| 298 | 3 | 137 | 15 | 425 | g9558703 | 4.00E−20 | protease [Homo sapiens] |
| 298 | 3 | 137 | 15 | 425 | g1780976 | 5.00E−20 | protease [Human endogenous retrovirus K] |
| 299 | 2 | 169 | 59 | 565 | g10434856 | 2.00E−40 | unnamed protein product [Homo sapiens] |
| 299 | 2 | 169 | 59 | 565 | g5262560 | 2.00E−40 | hypothetical protein [Homo sapiens] |
| 299 | 2 | 169 | 59 | 565 | g930123 | 1.00E−31 | zinc finger protein (583 AA) [Homo sapiens] |
| 300 | 3 | 135 | 3 | 407 | g10434856 | 3.00E−35 | unnamed protein product [Homo sapiens] |
| 300 | 3 | 135 | 3 | 407 | g5262560 | 3.00E−35 | hypothetical protein [Homo sapiens] |
| 300 | 3 | 135 | 3 | 407 | g10434195 | 2.00E−27 | unnamed protein product [Homo sapiens] |
| 301 | 1 | 170 | 22 | 531 | g10047297 | 2.00E−23 | KIAA1611 protein [Homo sapiens] |
| 301 | 1 | 170 | 22 | 531 | g7023216 | 2.00E−22 | unnamed protein product [Homo sapiens] |
| 301 | 1 | 170 | 22 | 531 | g347906 | 5.00E−16 | zinc finger protein [Homo sapiens] |
| 302 | 3 | 181 | 3 | 545 | g5931821 | 8.00E−79 | dJ228H13.3 (zinc finger protein) [Homo sapiens] |
| 302 | 3 | 181 | 3 | 545 | g6807587 | 8.00E−79 | hypothetical protein [Homo sapiens] |
| 302 | 3 | 181 | 3 | 545 | g488555 | 2.00E−63 | zinc finger protein ZNF135 [Homo sapiens] |
| 303 | 1 | 263 | 1 | 789 | g506502 | 1.00E−141 | NK10 [Mus musculus] |
| 303 | 1 | 263 | 1 | 789 | g488555 | 1.00E−92 | zinc finger protein ZNF135 [Homo sapiens] |
| 303 | 1 | 263 | 1 | 789 | g8453103 | 7.00E−88 | zinc finger protein [Homo sapiens] |
| 304 | 3 | 340 | 18 | 1037 | g7023216 | 1.00E−142 | unnamed protein product [Homo sapiens] |
| 304 | 3 | 340 | 18 | 1037 | g7023703 | 2.00E−89 | unnamed protein product [Homo sapiens] |
| 304 | 3 | 340 | 18 | 1037 | g10436789 | 7.00E−54 | unnamed protein product [Homo sapiens] |
| 305 | 1 | 89 | 103 | 369 | g7023216 | 2.00E−18 | unnamed protein product [Homo sapiens] |
| 305 | 1 | 89 | 103 | 369 | g9802037 | 4.00E−16 | zinc finger protein SBZF3 [Homo sapiens] |
| 305 | 1 | 89 | 103 | 369 | g7239109 | 7.00E−15 | HSPC059 [Homo sapiens] |
| 306 | 1 | 80 | 1 | 240 | g7959865 | 9.00E−20 | PRO2032 [Homo sapiens] |
| 306 | 1 | 80 | 1 | 240 | g8099520 | 6.00E−11 | muscleblind [Mus musculus] |
| 306 | 1 | 80 | 1 | 240 | g8515711 | 2.00E−10 | EXP35 [Homo sapiens] |
| 307 | 2 | 386 | 176 | 1333 | g3869259 | 0 | ZNF202 beta [Homo sapiens] |
| 307 | 2 | 386 | 176 | 1333 | g7328045 | 0 | hypothetical protein [Homo sapiens] |
| 307 | 2 | 386 | 176 | 1333 | g5360097 | 1.00E−123 | putative kruppel-related zinc finger protein NY-REN-23 antigen [Homo |
| | | | | | | | sapiens] |
| 308 | 2 | 368 | 71 | 1174 | g3882241 | 0 | KIAA0760 protein [Homo sapiens] |
| 308 | 2 | 368 | 71 | 1174 | g6760445 | 0 | Smad-and Olf-interacting zinc finger protein [Homo sapiens] |
| 308 | 2 | 368 | 71 | 1174 | g2149792 | 0 | Roaz [Rattus norvegicus] |
| 309 | 2 | 175 | 191 | 715 | g487787 | 8.00E−15 | zinc finger protein ZNF140 [Homo sapiens] |
| 309 | 2 | 175 | 191 | 715 | g10047183 | 9.00E−31 | KIAA1559 protein [Homo sapiens] |
| 309 | 2 | 175 | 191 | 715 | g4567179 | 2.00E−29 | BC37295_1 [Homo sapiens] |
| 310 | 2 | 78 | 521 | 754 | | | |
| 311 | 1 | 61 | 394 | 576 | | | |
| 312 | 1 | 73 | 172 | 390 | g2587027 | 4.00E−13 | HERV-E envelope glycoprotein [Homo sapiens] |
| 312 | 1 | 73 | 172 | 390 | g2587024 | 4.00E−13 | HERV-E envelope glycoprotein [Homo sapiens] |
| 312 | 1 | 73 | 172 | 390 | g1049232 | 2.00E−10 | HERV-E envelope protein [Human endogenous retrovirus] |
| 313 | 1 | 184 | 304 | 855 | g8132311 | 2.00E−74 | inwardly-rectifying potassium channel Kir5.1 [Homo sapiens] |
| 313 | 1 | 184 | 304 | 855 | g8132295 | 2.00E−74 | inwardly-rectifying potassium channel Kir5.1 [Homo sapiens] |
| 313 | 1 | 184 | 304 | 855 | g8132293 | 2.00E−74 | inwardly-rectifying potassium channel Kir5.1 [Homo sapiens] |
| 314 | 2 | 219 | 164 | 820 | g7105926 | 2.00E−22 | calcium channel alpha2-delta3 subunit [Homo sapiens] |
| 314 | 2 | 219 | 164 | 820 | g4186073 | 2.00E−22 | calcium channel alpha-2-delta-C subunit [Mus musculus] |
| 314 | 2 | 219 | 164 | 820 | g9929977 | 2.00E−22 | hypothetical protein [Macaca fascicularis] |
| 315 | 1 | 1603 | 1 | 4809 | g184039 | 0 | sodium channel alpha subunit [Homo sapiens] |
| 315 | 1 | 1603 | 1 | 4809 | g6782382 | 0 | voltage-gated sodium channel [Mus musculus] |
| 315 | 1 | 1603 | 1 | 4809 | g206858 | 0 | sodium channel alpha-subunit [Rattus norvegicus] |
| 316 | 3 | 200 | 240 | 839 | g913242 | 5.00E−71 | gamma-aminobutyric acid transporter type 3, GABA transporter type 3, GAT-3 |
| | | | | | | | [human, fetal brain, Peptide, 632 aa] [Homo sapiens] |
| 316 | 3 | 200 | 240 | 839 | g204220 | 2.00E−69 | beta-alanine-sensitive neuronal GABA transporter [Rattus norvegicus] |
| 316 | 3 | 200 | 240 | 839 | g202535 | 2.00E−69 | GABA transporter [Rattus norvegicus] |
| 317 | 3 | 329 | 3 | 989 | g6996442 | 4.00E−61 | CTL1 protein [Homo sapiens] |
| 317 | 3 | 329 | 3 | 989 | g6996589 | 1.00E−59 | CTL1 protein [Rattus norvegicus] |
| 317 | 3 | 329 | 3 | 989 | g6996587 | 2.00E−51 | CTL1 protein [Torpedo marmorata] |
| 318 | 3 | 256 | 3 | 770 | g5091520 | 1.00E−134 | ESTs AU058081(E30812),AU058365(E50679), AU030138(E50679) |
| | | | | | | | correspond to a region of the predicted gene.; Similar to Spinacia oleracea |
| | | | | | | | mRNA for proteasome 37 kD subunit.(X96974) [Oryza sativa] |
| 318 | 3 | 256 | 3 | 770 | g8096329 | 1.00E−134 | ESTs AU058081(E3082),AU075427(E30384) correspond to a region of the |
| | | | | | | | predicted gene.˜Similar to Spinacia oleracea proteasome 27 kD subunit |
| | | | | | | | (P52427) [Oryza sativa] |
| 318 | 3 | 256 | 3 | 770 | g8096319 | 1.00E−134 | ESTs AU058081(E3082),AU075427(E30384) correspond to a region of the |
| | | | | | | | predicted gene. ˜Similar to Spinacia oleracea proteasome 27 kD subunit |
| | | | | | | | (P52427) [Oryza sativa] |
| 319 | 2 | 76 | 2 | 229 | g951425 | 2.00E−07 | housekeeping protein [Rattus norvegicus] |
| 319 | 2 | 76 | 2 | 229 | g5759144 | 2.00E−07 | cyclophilin A [Mus musculus] |
| 319 | 2 | 76 | 2 | 229 | g50621 | 2.00E−07 | cyclophilin (AA 1-164) [Mus musculus] |
| 320 | 3 | 276 | 354 | 1181 | g7019854 | 1.00E−84 | unnamed protein product [Homo sapiens] |
| 320 | 3 | 276 | 354 | 1181 | g6567172 | 7.00E−84 | mDj10 [Mus musculus] |
| 320 | 3 | 276 | 354 | 1181 | g10436329 | 5.00E−81 | unnamed protein product [Homo sapiens] |
| 321 | 1 | 115 | 328 | 672 | g1049232 | 3.00E−24 | HERV-E envelope protein [Human endogenous retrovirus] |
| 321 | 1 | 115 | 328 | 672 | g2587024 | 2.00E−23 | HERV-E envelope glycoprotein [Homo sapiens] |
| 321 | 1 | 115 | 328 | 672 | g2587027 | 2.00E−23 | HERV-E envelope glycoprotein [Homo sapiens] |
| 322 | 3 | 227 | 3 | 683 | g2286123 | 6.00E−33 | testis specific DNAj-homolog [Mus musculus] |
| 322 | 3 | 227 | 3 | 683 | g6681592 | 1.00E−32 | DnaJ homolog [Homo sapiens] |
| 322 | 3 | 227 | 3 | 683 | g6648623 | 1.00E−32 | DNAJ homolog [Homo sapiens] |
| 323 | 3 | 100 | 153 | 452 | | | |
| 324 | 3 | 142 | 840 | 1265 | g2943716 | 5.00E−81 | 25 kDa trypsin inhibitor [Homo sapiens] |
| 324 | 3 | 142 | 840 | 1265 | g9885193 | 5.00E−54 | dJ881L22.3 (novel protein similar to a trypsin inhibitor) [Homo sapiens] |
| 324 | 3 | 142 | 840 | 1265 | g4324682 | 2.00E−52 | late gestation lung protein 1 [Rattus norvegicus] |
| 325 | 3 | 263 | 3 | 791 | g6957716 | 1.00E−135 | putative chaperonin [Arabidopsis thaliana] |
| 325 | 3 | 263 | 3 | 791 | g9755653 | 1.00E−132 | TCP-1 chaperonin-like protein [Arabidopsis thallana] |
| 325 | 3 | 263 | 3 | 791 | g5295933 | 2.00E−93 | chaperonin containing TCP-1 zeta-1 subunit [Mus musculus] |
| 326 | 2 | 357 | 23 | 1093 | g3882167 | 1.00E−171 | KIAA0723 protein [Homo sapiens] |
| 326 | 2 | 357 | 23 | 1093 | g9956070 | 1.00E−171 | similar to Homo sapiens mRNA for KIAA0723 protein with GenBank |
| | | | | | | | Accession Number AB018266.1 [] |
| 326 | 2 | 357 | 23 | 1093 | g6563246 | 1.00E−170 | matrin 3 [Homo sapiens] |
| 327 | 2 | 100 | 656 | 955 | | | |
| 328 | 2 | 303 | 2 | 910 | g8980660 | 1.00E−158 | proliferation-associated SNF2-like protein [Homo sapiens] |
| 328 | 2 | 303 | 2 | 910 | g805296 | 1.00E−149 | lymphocyte specific helicase [Mus musculus] |
| 328 | 2 | 303 | 2 | 910 | g9956001 | 8.00E−86 | similar to Mus musculus lymphocyte specific helicase mRNA with GenBank |
| | | | | | | | Accession Number U25691.1 [Homo sapiens] |
| 329 | 2 | 72 | 167 | 382 | | | |
| 330 | 2 | 76 | 80 | 307 | | | |
| 331 | 2 | 74 | 446 | 667 | g2104910 | 1.00E−29 | ORF derived from D1 leader region and integrase coding region [Homo |
| | | | | | | | sapiens] |
| 331 | 2 | 74 | 446 | 667 | g2104914 | 5.00E−21 | ORF derived from protease and integrase coding regions [Homo sapiens] |
| 331 | 2 | 74 | 446 | 667 | g4959374 | 5.00E−21 | pol protein [Homo sapiens] |
| 332 | 3 | 67 | 57 | 257 | | | |
| 333 | 2 | 192 | 302 | 877 | g8980660 | 8.00E−92 | proliferation-associated SNF2-like protein [Homo sapiens] |
| 333 | 2 | 192 | 302 | 877 | g9956001 | 8.00E−92 | similar to Mus musculus lymphocyte specific helicase mRNA with GenBank |
| | | | | | | | Accession Number U25691.1 [Homo sapiens] |
| 333 | 2 | 192 | 302 | 877 | g7022306 | 1.00E−89 | unnamed protein product [Homo sapiens] |
| 334 | 2 | 74 | 446 | 667 | g2104910 | 1.00E−30 | ORF derived from D1 leader region and integrase coding region [Homo |
| | | | | | | | sapiens] |
| 334 | 2 | 74 | 446 | 667 | g2104914 | 5.00E−21 | ORF derived from protease and integrase coding regions [Homo sapiens] |
| 334 | 2 | 74 | 446 | 667 | g4959374 | 5.00E−21 | pol protein [Homo sapiens] |
| 335 | 2 | 72 | 167 | 382 | | | |
| 336 | 2 | 55 | 557 | 721 | g2231380 | 8.00E−12 | orf; encodes putative chimeric protein with SET domain in N-terminus with |
| | | | | | | | similarity to several other human, Drosophlla, nematode and yeast proteins |
| | | | | | | | [Homo sapiens] |
| 336 | 2 | 55 | 557 | 721 | g3005702 | 8.00E−12 | unknown [Homo sapiens] |
| 336 | 2 | 55 | 557 | 721 | g1263081 | 1.00E−11 | mariner transposase [Homo sapiens] |
| 337 | 3 | 107 | 1614 | 1934 | | | |
| 338 | 3 | 147 | 63 | 503 | g10047265 | 7.00E−81 | KIAA1595 protein [Homo sapiens] |
| 338 | 3 | 147 | 63 | 503 | g10176757 | 3.00E−26 | ATP-dependent RNA helicase-like protein [Arabidopsis thaliana] |
| 338 | 3 | 147 | 63 | 503 | g3776011 | 3.00E−26 | RNA helicase [Arabidopsis thaliana] |
| 339 | 1 | 257 | 199 | 969 | g10434055 | 1.00E−128 | unnamed protein product [Homo sapiens] |
| 339 | 1 | 257 | 199 | 969 | g7243213 | 1.00E−126 | KIAA1416 protein [Homo sapiens] |
| 339 | 1 | 257 | 199 | 969 | g11345539 | 1.00E−120 | dJ620E11.1 (novel Helicase C-terminal domain and SNF2 N-terminal domains |
| | | | | | | | containing protein, similar to KIAA0308) [Homo sapiens] |
| 340 | 3 | 63 | 3 | 191 | | | |
| 341 | 1 | 112 | 1639 | 1974 | | | |
| 342 | 3 | 427 | 2097 | 3377 | g2599502 | 0 | protocadherin 68 [Homo sapiens] |
| 342 | 3 | 427 | 2097 | 3377 | g7243181 | 4.00E−49 | KIAA1400 protein [Homo sapiens] |
| 342 | 3 | 427 | 2097 | 3377 | g4099551 | 5.00E−48 | OL-protocadherin [Mus musculus] |
| 343 | 2 | 144 | 635 | 1066 | g10436424 | 1.00E−10 | unnamed protein product [Homo sapiens] |
| 344 | 2 | 97 | 557 | 847 | | | |
| 345 | 3 | 75 | 675 | 899 | g2587027 | 4.00E−13 | HERV-E envelope glycoprotein [Homo sapiens] |
| 345 | 3 | 75 | 675 | 899 | g2587024 | 4.00E−13 | HERV-E envelope glycoprotein [Homo sapiens] |
| 345 | 3 | 75 | 675 | 899 | g1049232 | 2.00E−10 | HERV-E envelope protein [Human endogenous retrovirus] |
| 346 | 3 | 135 | 399 | 803 | g9368839 | 2.00E−71 | hypothetical protein [Homo sapiens] |
| 346 | 3 | 135 | 399 | 803 | g2739452 | 6.00E−58 | ribosomal protein L23A [Homo sapiens] |
| 346 | 3 | 135 | 399 | 803 | g1399086 | 6.00E−58 | ribosomal protein L23a [Homo sapiens] |
| 347 | 2 | 55 | 179 | 343 | | | |
| 348 | 2 | 129 | 425 | 811 | g11493463 | 2.00E−22 | PRO2852 [Homo sapiens] |
| 348 | 2 | 129 | 425 | 811 | g9280152 | 5.00E−22 | unnamed portein product [Macaca fascicularis] |
| 348 | 2 | 129 | 425 | 811 | g10437485 | 5.00E−21 | unnamed protein product [Homo sapiens] |
| 349 | 2 | 291 | 122 | 994 | g673417 | 1.00E−152 | class II antigen [Homo sapiens] |
| 349 | 2 | 291 | 122 | 994 | g703089 | 1.00E−152 | MHC class II DP3-alpha [Homo sapiens] |
| 349 | 2 | 291 | 122 | 994 | g758100 | 1.00E−137 | SB classII histocompatibility antigen alpha- chain [Homo sapiens] |
| 350 | 1 | 517 | 1 | 1551 | g402843 | 1.00E−144 | cytochrome P450 2B-Bx = phenobarbital-inducible [rabbits, kidney, Peptide, 491 |
| | | | | | | | aa] [Oryctolagus cuniculus] |
| 350 | 1 | 517 | 1 | 1551 | g404777 | 1.00E−144 | cytochrome P-450 2B-Bx [Oryctolagus cuniculus] |
| 350 | 1 | 517 | 1 | 1551 | g164959 | 1.00E−142 | cytochrome P-450 [Oryctolagus cuniculus] |
| 351 | 1 | 232 | 1300 | 1995 | | | |
| 352 | 1 | 220 | 67 | 726 | g11863734 | 2.00E−80 | dJ857M17.2 (novel protein similar to cytochrome c oxidase subunit IV |
| | | | | | | | (COX4)) [Homo sapiens] |
| 352 | 1 | 220 | 67 | 726 | g8809758 | 9.00E−42 | cytochrome c oxidase subunit IV isoform 2 precursor [Thunnus obesus] |
| 352 | 1 | 220 | 67 | 726 | g2809498 | 3.00E−41 | cytochrome c oxidase subunit IV [Gorilla gorilla] |
| 353 | 1 | 95 | 1 | 285 | | | |
| 354 | 2 | 331 | 2 | 994 | g11229985 | 1.00E−176 | unnamed protein product [Homo sapiens] |
| 354 | 2 | 331 | 2 | 994 | g11229992 | 6.00E−57 | unnamed protein product [Mus musculus] |
| 354 | 2 | 331 | 2 | 994 | g30095 | 6.00E−49 | collagen subunit (alpha-1 (X)) 3 [Homo sapiens] |
| 355 | 3 | 93 | 54 | 332 | g11177164 | 4.00E−12 | polydom protein [Mus musculus] |
| 355 | 3 | 93 | 54 | 332 | g391669 | 4.00E−07 | hikaru genki type4 product precursor [Drosophila melanogaster] |
| 355 | 3 | 93 | 54 | 332 | g391667 | 4.00E−07 | hikaru genki type3 product precursor [Drosophila melanogaster] |
| 356 | 1 | 112 | 1 | 336 | | | |
| 357 | 3 | 73 | 192 | 410 | | | |
| 358 | 1 | 239 | 181 | 897 | g4582324 | 1.00E−129 | dJ708F5.1 (PUTATIVE novel Collagen alpha 1 LIKE protein) [Homo sapiens] |
| 358 | 1 | 239 | 181 | 897 | g1732121 | 4.00E−36 | cartilage matrix protein [Homo sapiens] |
| 358 | 1 | 239 | 181 | 897 | g180654 | 2.00E−35 | cartilage matrix protein [Homo sapiens] |
| 359 | 1 | 528 | 4 | 1587 | g1903218 | 0 | type II intermediate filament of hair keratin [Homo sapiens] |
| 359 | 1 | 528 | 4 | 1587 | g7161771 | 0 | keratin [Homo sapiens] |
| 359 | 1 | 528 | 4 | 1587 | g4103156 | 0 | hair keratin basic 5; keratin Hb5 [Mus musculus] |
| 360 | 2 | 157 | 161 | 631 | g11034725 | 2.00E−64 | hNBL4 [Homo sapiens] |
| 360 | 2 | 157 | 161 | 631 | g466548 | 3.00E−63 | NBL4 [Mus musculus] |
| 360 | 2 | 157 | 161 | 631 | g2822458 | 5.00E−54 | band 4.1-like protein 4 [Danio rerio] |
| 361 | 3 | 65 | 54 | 248 | g3724141 | 6.00E−08 | myosin I [Rattus norvegicus] |
| 361 | 3 | 65 | 54 | 248 | g3882175 | 6.00E−08 | KIAA0727 protein [Homo sapiens] |
| 362 | 3 | 517 | 3 | 1553 | g6855339 | 1.00E−120 | dJ111C20.1 (similar to Chlamydomonas radial spoke protein 3) [Homo |
| | | | | | | | sapiens] |
| 362 | 3 | 517 | 3 | 1553 | g18218 | 1.00E−75 | spoke protein [Chlamydomonas reinhardtii] |
| 362 | 3 | 517 | 3 | 1553 | g7295323 | 9.00E−47 | CG10099 gene product [Drosophila melanogaster] |
| 363 | 2 | 60 | 314 | 493 | | | |
| 364 | 1 | 239 | 127 | 843 | g1813638 | 9.00E−53 | PF20 [Chlamydomonas reinhardtii] |
| 364 | 1 | 239 | 127 | 843 | g3983133 | 2.00E−47 | pf20 homolog [Trypanosoma brucei] |
| 364 | 1 | 239 | 127 | 843 | g607003 | 1.00E−37 | beta transducin-like protein [Podospora anserina] |
| 365 | 1 | 160 | 1 | 480 | | | |
| 366 | 3 | 757 | 3 | 2273 | g8896164 | 0 | kinesin-like protein GAKIN [Homo sapiens] |
| 366 | 3 | 757 | 3 | 2273 | g10697238 | 0 | KIF13A [Mus musculus] |
| 366 | 3 | 757 | 3 | 2273 | g11761613 | 0 | kinesin-like protein RBKIN2 [Homo sapiens] |
| 367 | 3 | 162 | 3 | 488 | g11231085 | 1.00E−56 | hypothetical protein [Macaca fascicularis] |
| 367 | 3 | 162 | 3 | 488 | g7385113 | 2.00E−18 | ankyrin 1 [Bos taurus] |
| 367 | 3 | 162 | 3 | 488 | g747710 | 2.00E−18 | alt, ankyrin (variant 2.2) [Homo sapiens] |
| 368 | 2 | 635 | 308 | 2212 | g1353782 | 0 | dystrophin-related protein 2 [Homo sapiens] |
| 368 | 2 | 635 | 308 | 2212 | g11066165 | 0 | dystrophin-related protein 2 A-form splice variant [Rattus norvegicus] |
| 368 | 2 | 635 | 308 | 2212 | g11066167 | 0 | dystrophin-related protein 2 B-form splice variant [Rattus norvegicus] |
| 369 | 3 | 433 | 999 | 2297 | g190752 | 0 | pemphigus vulgaris antigen [Homo sapiens] |
| 369 | 3 | 433 | 999 | 2297 | g2290200 | 1.00E−176 | desmoglein 3 [Mus musculus] |
| 369 | 3 | 433 | 999 | 2297 | g416178 | 2.00E−58 | desmoglein 2 [Homo sapiens] |
| 370 | 3 | 531 | 3 | 1595 | g28969 | 7.00E−71 | 64 Kd autoantigen [Homo sapiens] |
| 370 | 3 | 531 | 3 | 1595 | g6934240 | 8.00E−61 | tropomodulin 2 [Homo sapiens] |
| 370 | 3 | 531 | 3 | 1595 | g7288857 | 3.00E−60 | neural tropomodulin N-Tmod [Mus musculus] |
| 371 | 2 | 257 | 383 | 1153 | g1469868 | 1.00E−124 | The KIAA0143 gene product is related to a putative C.elegans gene encoded |
| | | | | | | | on cosmid C32D5. [Homo sapiens] |
| 371 | 2 | 257 | 383 | 1153 | g4589550 | 4.00E−82 | KIAA0953 protein [Homo sapiens] |
| 371 | 2 | 257 | 383 | 1153 | g7304005 | 1.00E−55 | cmp44E gene product [alt 1] [Drosophila melanogaster] |
| 372 | 1 | 242 | 139 | 864 | g387514 | 1.00E−123 | DM-20 protein [Mus musculus] |
| 372 | 1 | 242 | 139 | 864 | g190088 | 1.00E−123 | DM-20 [Homo sapiens] |
| 372 | 1 | 242 | 139 | 864 | g200409 | 1.00E−122 | proteolipid protein variant Dm-20 [Mus musculus] |
| 373 | 2 | 60 | 380 | 559 | | | |
| 374 | 1 | 157 | 22 | 492 | g7268562 | 1.00E−59 | ribosomal protein L32-like protein [Arabidopsis thaliana] |
| 374 | 1 | 157 | 22 | 492 | g5816996 | 1.00E−59 | ribosomal protein L32-like protein [Arabidopsis thaliana] |
| 374 | 1 | 157 | 22 | 492 | g10177580 | 7.00E−59 | ribosomal protein L32 [Arabidopsis thaliana] |
| 375 | 3 | 158 | 3 | 476 | g643074 | 4.00E−76 | putative 40S ribosomal protein s12 [Fragaria x ananassa] |
| 375 | 3 | 158 | 3 | 476 | g6716785 | 1.00E−75 | 40s ribosomal protein S23 [Euphorbia esula] |
| 375 | 3 | 158 | 3 | 476 | g7413571 | 6.00E−75 | putative protein [Arabidopsis thaliana] |
| 376 | 2 | 238 | 14 | 727 | g10799832 | 1.00E−93 | ribosomal protein L11-like [Nicotiana tabacum] |
| 376 | 2 | 238 | 14 | 727 | g7630065 | 4.00E−93 | ribosomal protein L11-like [Arabidopsis thaliana] |
| 376 | 2 | 238 | 14 | 727 | g11908058 | 4.00E−93 | ribosomal protein L11, cytosolic [Arabidopsis thaliana] |
| 377 | 3 | 102 | 3 | 308 | g57131 | 7.00E−41 | ribosomal protein S26 [Rattus norvegicus] |
| 377 | 3 | 102 | 3 | 308 | g296452 | 7.00E−41 | ribosomal protein S26 [Homo sapiens] |
| 377 | 3 | 102 | 3 | 308 | g3335024 | 7.00E−41 | ribosomal protein S26 [Homo sapiens] |
| 378 | 1 | 102 | 316 | 621 | g6969165 | 6.00E−53 | dJ475N16.3 (novel protein similar to RPL7A (60S ribosomal protein L7A)) |
| | | | | | | | [Homo sapiens] |
| 378 | 1 | 102 | 316 | 621 | g6687301 | 2.00E−21 | 60S ribosomal protein L7 [Cyanophora paradoxa] |
| 378 | 1 | 102 | 316 | 621 | g200785 | 1.00E−20 | ribosomal protein L7 [Mus musculus] |
| 379 | 3 | 177 | 3 | 533 | g206736 | 1.00E−82 | ribosomal protein L7 [Rattus norvegicus] |
| 379 | 3 | 177 | 3 | 533 | g200785 | 2.00E−80 | ribosomal protein L7 [Mus musculus] |
| 379 | 3 | 177 | 3 | 533 | g554269 | 2.00E−80 | ribosomal protein L7 [Mus musculus] |
| 380 | 2 | 86 | 257 | 514 | g550025 | 2.00E−31 | ribosomal protein S10 [Homo sapiens] |
| 380 | 2 | 86 | 257 | 514 | g57127 | 3.00E−30 | ribosomal protein S10 (AA 1-165) [Rattus norvegicus] |
| 380 | 2 | 86 | 257 | 514 | g9581772 | 3.00E−29 | bA371L19.2 (similar to ribosomal protein S10) [Homo sapiens] |
| 381 | 1 | 97 | 286 | 576 | g36140 | 2.00E−31 | ribosomal protein L7 [Homo sapiens] |
| 381 | 1 | 97 | 286 | 576 | g307388 | 2.00E−31 | ribosomal protein L7 [Homo sapiens] |
| 381 | 1 | 97 | 286 | 576 | g1335288 | 2.00E−31 | ribosomal protein L7 [Homo sapiens] |
| 382 | 1 | 82 | 70 | 315 | g409074 | 2.00E−19 | HBp15/L22 [Sus scrofa] |
| 382 | 1 | 82 | 70 | 315 | g409072 | 2.00E−19 | HBp15/L22 [Mus musculus] |
| 382 | 1 | 82 | 70 | 315 | g409070 | 2.00E−19 | HBp15/L22 [Homo sapiens] |
| 383 | 1 | 180 | 46 | 585 | g4886269 | 2.00E−75 | putative ribosomal protein S14 [Arabidopsis thaliana] |
| 383 | 1 | 180 | 46 | 585 | g6006890 | 6.00E−75 | putative 40S ribosomal protein s14; 67401-66292 [Arabidopsis thaliana] |
| 383 | 1 | 180 | 46 | 585 | g4678226 | 3.00E−74 | 40S ribosomal protein S14 [Arabidopsis thaliana] |
| 384 | 3 | 118 | 21 | 374 | g643074 | 2.00E−49 | putative 40S ribosomal protein s12 [Fragaria x ananassa] |
| 384 | 3 | 118 | 21 | 374 | g6716785 | 6.00E−49 | 40s ribosomal protein S23 [Euphorbia esula] |
| 384 | 3 | 118 | 21 | 374 | g7413571 | 3.00E−48 | putative protein [Arabidopsis thaliana] |
| 385 | 2 | 164 | 2 | 493 | g643074 | 4.00E−76 | putative 40S ribosomal protein s12 [Fragaria x ananassa] |
| 385 | 2 | 164 | 2 | 493 | g6716785 | 1.00E−75 | 40s ribosomal protein S23 [Euphorbia esula] |
| 385 | 2 | 164 | 2 | 493 | g7413571 | 6.00E−75 | putative protein [Arabidopsis thaliana] |
| 386 | 3 | 101 | 3 | 305 | g36130 | 1.00E−22 | ribosomal protein L31 (AA 1-125) [Homo sapiens] |
| 386 | 3 | 101 | 3 | 305 | g1655596 | 1.00E−22 | ribosomal protein L31 [Homo sapiens] |
| 386 | 3 | 101 | 3 | 305 | g57115 | 1.00E−22 | ribosomal protein L31 (AA 1-125) [Rattus norvegicus] |
| 387 | 3 | 259 | 3 | 779 | g2331301 | 1.00E−122 | ribosomal protein S4 type I [Zea mays] |
| 387 | 3 | 259 | 3 | 779 | g2345154 | 1.00E−120 | ribsomal protein S4 [Zea mays] |
| 387 | 3 | 259 | 3 | 779 | g7546687 | 1.00E−116 | ribosomal protein S4 [Arabidopsis thaliana] |
| 388 | 2 | 184 | 2 | 553 | g2668748 | 1.00E−95 | ribosomal protein L17 [Zea mays] |
| 388 | 2 | 184 | 2 | 553 | g19104 | 8.00E−85 | ribosomal protein L17-2 [Hordeum vulgare] |
| 388 | 2 | 184 | 2 | 553 | g19102 | 1.00E−82 | ribosomal protein L17-1 [Hordeum vulgare] |
| 389 | 2 | 152 | 2 | 457 | g338447 | 5.00E−28 | RPS16 [Homo sapiens] |
| 389 | 2 | 152 | 2 | 457 | g57714 | 5.00E−28 | ribosomal protein S16 (AA 1-146) [Rattus rattus] |
| 389 | 2 | 152 | 2 | 457 | g200796 | 2.00E−27 | 16S ribosomal protein [Mus musculus] |
| 390 | 3 | 158 | 3 | 476 | g643074 | 4.00E−76 | putative 40S ribosomal protein s12 [Fragaria x ananassa] |
| 390 | 3 | 158 | 3 | 476 | g6716785 | 1.00E−75 | 40s ribosomal protein S23 [Euphorbia esula] |
| 390 | 3 | 158 | 3 | 476 | g7413571 | 6.00E−75 | putative protein [Arabidopsis thaliana] |
| 391 | 1 | 94 | 34 | 315 | | | |
| 392 | 3 | 83 | 303 | 551 | g57121 | 3.00E−18 | ribosomal protein L37 [Rattus norvegicus] |
| 392 | 3 | 83 | 303 | 551 | g292441 | 3.00E−18 | ribosomal protein L37 [Homo sapiens] |
| 392 | 3 | 83 | 303 | 551 | g1839334 | 3.00E−18 | ribosomal protein L37 {C2-C2 zinc-finger-like} [human, HeLa cells, Peptlde, 97 |
| | | | | | | | aa] [Homo sapiens] |
| 393 | 2 | 174 | 2 | 523 | g10433651 | 3.00E−80 | unnamed protein product [Homo sapiens] |
| 393 | 2 | 174 | 2 | 523 | g10434617 | 3.00E−80 | unnamed protein product [Homo sapiens] |
| 393 | 2 | 174 | 2 | 523 | g545998 | 6.00E−79 | tricarboxylate carrier [Rattus sp.] |
| 394 | 3 | 183 | 3 | 551 | | | |
| 395 | 1 | 399 | 1 | 1197 | g11907599 | 0 | protein kinase HIPK2 [Homo sapiens] |
| 395 | 1 | 399 | 1 | 1197 | g5815141 | 0 | nuclear body associated kinase 1b [Mus musculus] |
| 395 | 1 | 399 | 1 | 1197 | g5815139 | 0 | nuclear body associated kinase 1a [Mus musculus] |
| 396 | 1 | 301 | 109 | 1011 | g7688667 | 1.00E−161 | PC326 protein [Homo sapiens] |
| 396 | 1 | 301 | 109 | 1011 | g2734854 | 1.00E−08 | Mus musculus Dentin Matrix Protein 1 [] |
| 396 | 1 | 301 | 109 | 1011 | g6137020 | 1.00E−08 | dentin matrix protein-1 [Mus musculus] |
| 397 | 2 | 105 | 2 | 316 | g178281 | 1.00E−47 | AHNAK nucleoprotein [Homo sapiens] |
| 397 | 2 | 105 | 2 | 316 | g50675 | 2.00E−47 | desmoyokin [Mus musculus] |
| 397 | 2 | 105 | 2 | 316 | g897824 | 5.00E−47 | AHNAK gene product [Homo sapiens] |
| 398 | 1 | 153 | 202 | 660 | g183233 | 1.00E−34 | beta-glucuronidase precursor (EC 3.2.1.31) [Homo sapiens] |
| 398 | 1 | 153 | 202 | 660 | g3549609 | 2.00E−33 | beta-glucuronidase [Cercopithecus aethiops] |
| 398 | 1 | 153 | 202 | 660 | g4102553 | 3.00E−29 | mutant beta-glucuronidase [Felis catus] |
| 399 | 1 | 161 | 106 | 588 | g7022046 | 1.00E−36 | unnamed protein product [Homo sapiens] |
| 399 | 1 | 161 | 106 | 588 | g7670456 | 5.00E−34 | unnamed protein product [Mus musculus] |
| 399 | 1 | 161 | 106 | 588 | g8671586 | 1.00E−29 | ataxin 2-binding protein [Homo sapiens] |
| 400 | 1 | 153 | 205 | 663 | g183233 | 1.00E−34 | beta-glucuronidase precursor (EC 3.2.1.31) [Homo sapiens] |
| 400 | 1 | 153 | 205 | 663 | g3549609 | 2.00E−33 | beta-glucuronidase [Cercopithecus aethiops] |
| 400 | 1 | 153 | 205 | 663 | g4102553 | 3.00E−29 | mutant beta-glucuronidase [Felis catus] |
| 401 | 3 | 135 | 651 | 1055 | g414797 | 9.00E−58 | pyruvate dehydrogenase phosphatase [Bos taurus] |
| 401 | 3 | 135 | 651 | 1055 | g3298607 | 3.00E−56 | pyruvate dehydrogenase phosphatase isoenzyme 1 [Rattus norvegicus] |
| 401 | 3 | 135 | 651 | 1055 | g7688679 | 3.00E−53 | pyruvate dehydrogenase [Homo sapiens] |
| 402 | 3 | 129 | 30 | 416 | | | |
| 403 | 1 | 299 | 1 | 897 | g440878 | 1.00E−149 | onconeural ventral antigen-1 [Homo sapiens] |
| 403 | 1 | 299 | 1 | 897 | g7025507 | 1.00E−137 | ventral neuron-specific protein 1 NOVA1 [Mus musculus] |
| 403 | 1 | 299 | 1 | 897 | g2673961 | 9.00E−99 | astrocytic NOVA-like RNA-binding protein [Homo sapiens] |
| 404 | 1 | 142 | 1 | 426 | g4105111 | 1.00E−43 | dehydrin 6 [Hordeum vulgare] |
| 404 | 1 | 142 | 1 | 426 | g6017938 | 4.00E−43 | dehydrin; DHN6 [Hordeum vulgare] |
| 404 | 1 | 142 | 1 | 426 | g5738195 | 1.00E−28 | abscisic acid response protein [Prunus dulcis] |
| 405 | 2 | 168 | 2 | 505 | g453189 | 9.00E−59 | acyl carrier protein [Zea mays] |
| 405 | 2 | 168 | 2 | 505 | g166971 | 4.00E−49 | acyl carrier protein III [Hordeum vulgare] |
| 405 | 2 | 168 | 2 | 505 | g166969 | 6.00E−41 | acyl carrier protein II [Hordeum vulgare] |
| 406 | 2 | 117 | 2 | 352 | g203923 | 1.00E−40 | diazepam binding inhibitor [Rattus norvegicus] |
| 406 | 2 | 117 | 2 | 352 | g1228089 | 1.00E−40 | multifunctional acyl-CoA-binding protein [Rattus norvegicus] |
| 406 | 2 | 117 | 2 | 352 | g203925 | 1.00E−40 | diazepam binding inhibitor [Rattus norvegicus] |
| 407 | 3 | 804 | 3 | 2414 | g10953883 | 0 | ubiquitin E3 ligase SMURF2 [Homo sapiens] |
| 407 | 3 | 804 | 3 | 2414 | g10047327 | 0 | KIAA1625 protein [Homo sapiens] |
| 407 | 3 | 804 | 3 | 2414 | g6446606 | 0 | E3 ubiquitin ligase SMURF1 [Homo sapiens] |
| 408 | 1 | 220 | 244 | 903 | g9622856 | 9.00E−24 | sorting nexin 15A [Homo sapiens] |
| 408 | 1 | 220 | 244 | 903 | g2529709 | 1.00E−23 | unknown [Homo sapiens] |
| 408 | 1 | 220 | 244 | 903 | g9622854 | 1.00E−23 | sorting nexin 15 [Homo sapiens] |
| 409 | 2 | 168 | 80 | 583 | g5823961 | 2.00E−87 | dJ20B11.1 (ortholog of rat RSEC5 (mammalian exocyst complex subunit)) |
| | | | | | | | [Homo sapiens] |
| 409 | 2 | 168 | 80 | 583 | g2827158 | 2.00E−84 | rsec5 [Rattus norvegicus] |
| 409 | 2 | 168 | 80 | 583 | g7295804 | 8.00E−29 | CG8843 gene product [Drosophila melanogaster] |
| 410 | 2 | 108 | 194 | 517 | g9963839 | 1.00E−50 | lipase [Homo sapiens] |
| 411 | 1 | 314 | 277 | 1218 | g3243240 | 4.00E−56 | syntaxin 11 [Homo sapiens] |
| 411 | 1 | 314 | 277 | 1218 | g4104685 | 1.00E−53 | syntaxin 11 [Homo sapiens] |
| 411 | 1 | 314 | 277 | 1218 | g3248918 | 8.00E−46 | syntaxin 11 [Homo sapiens] |
| 412 | 2 | 143 | 212 | 640 | g4512103 | 3.00E−57 | rab11 binding protein [Bos taurus] |
| 412 | 2 | 143 | 212 | 640 | g6049150 | 8.00E−43 | WD-containing protein [Rattus norvegicus] |
| 413 | 1 | 122 | 1 | 366 | | | |
| 414 | 2 | 86 | 623 | 880 | | | |
| 415 | 3 | 213 | 183 | 821 | | | |
| 416 | 1 | 263 | 40 | 828 | g9558701 | 3.00E−31 | gag [Homo sapiens] |
| 416 | 1 | 263 | 40 | 828 | g5802824 | 3.00E−31 | Gag-Pro-Pol protein [Homo sapiens] |
| 416 | 1 | 263 | 40 | 828 | g5802821 | 3.00E−31 | Gag-Pro-Pol protein [Homo sapiens] |
| 417 | 1 | 175 | 940 | 1464 | g246483 | 1.00E−63 | prohibitin [human, Peptide, 272 aa] [Homo sapiens] |
| 417 | 1 | 175 | 940 | 1464 | g206384 | 2.00E−63 | prohibitin [Rattus norvegicus] |
| 417 | 1 | 175 | 940 | 1464 | g541732 | 2.00E−63 | prohibitin or B-cell receptor associated protein (BAP) 32 [Mus musculus] |
| 418 | 2 | 272 | 167 | 982 | g505033 | 6.00E−75 | mitogen inducible gene mlg-2 [Homo sapiens] |
| 418 | 2 | 272 | 167 | 982 | g10727293 | 5.00E−33 | CG14991 gene product [alt 2] [Drosophila melanogaster] |
| 418 | 2 | 272 | 167 | 982 | g7292434 | 5.00E−33 | CG14991 gene product [alt 1] [Drosophila melanogaster] |
| 419 | 1 | 167 | 16 | 516 | g2587027 | 3.00E−34 | HERV-E envelope glycoprotein [Homo sapiens] |
| 419 | 1 | 167 | 16 | 516 | g2587024 | 3.00E−34 | HERV-E envelope glycoprotein [Homo sapiens] |
| 419 | 1 | 167 | 16 | 516 | g1049232 | 2.00E−31 | HERV-E envelope protein [Human endogenous retrovirus] |
| 420 | 2 | 59 | 227 | 403 | | | |
| 421 | 1 | 216 | 1 | 648 | g10504238 | 1.00E−101 | hepatocellular carcinoma-related putative tumor suppressor [Homo sapiens] |
| 421 | 1 | 216 | 1 | 648 | g7020759 | 7.00E−75 | unnamed protein product [Homo sapiens] |
| 421 | 1 | 216 | 1 | 648 | g3880143 | 1.00E−28 | contains similarity to Pfam domain: PF01585 (G-patch domain), Score = 67.0, E |
| | | | | | | | value = 1.3e−16, N = 1 [Caenorhabditis elegans] |
| 422 | 1 | 162 | 1 | 486 | g4982485 | 7.00E−55 | apoptosis related protein APR-3 [Homo sapiens] |
| 422 | 1 | 162 | 1 | 486 | g4689122 | 3.00E−49 | HSPC013 [Homo sapiens] |

[0903] TABLE 7

| | | | Parameter |
|---|---|---|---|
| Program | Description | Reference | Threshold |
| ABIFACTURA | A program that removes vector sequences and | Applied Biosystems, Foster City, CA. | |
| | masks ambiguous bases in nucleic acid sequences. | | |
| ABI/ | A Fast Data Finder useful in comparing and | Applied Biosystems, Foster City, CA; | Mismatch < |
| PARACEL | annotating amino acid or nucleic acid sequences. | Paracel Inc., Pasadena, CA. | 50% |
| FDF | | | |
| ABI | A program that assembles nucleic acid sequences. | Applied Biosystems, Foster City, CA. | |
| AutoAssembler | | | |
| BLAST | A Basic Local Alignment Search Tool useful in | Altschul, S. F. et al. (1990) J. Mol. Biol. | ESTs: |
| | sequence similarity search for amino acid and | 215: 403-410; Altschul, S. F. et al. (1997) | Probability |
| | nucleic acid sequences. BLAST includes five | Nucleic Acids Res. 25: 3389-3402. | value = 1.0E−8 |
| | functions: blastp, blastn, blastx, tblastn, and tblastx. | | or less Full |
| | | | Length |
| | | | sequences: |
| | | | Probability |
| | | | value = |
| | | | 1.0E−10 or less |
| FASTA | A Pearson and Lipman algorithm that searches for | Pearson, W. R. and D. J. Lipman (1988) Proc. | ESTs: fasta E |
| | similarity between a query sequence and a group of | Natl. Acad Sci. USA 85: 2444-2448; Pearson, | value = |
| | sequences of the same type. FASTA comprises as | W. R. (1990) Methods Enzymol. 183: 63-98; | 1.06E−6 |
| | least five functions: fasta, tfasta, fastx, tfastx, and | and Smith, T. F. and M. S. Waterman (1981) | Assembled |
| | ssearch. | Adv. Appl. Math. 2: 482-489. | ESTs: fasta |
| | | | Identity = 95% |
| | | | or greater and |
| | | | Match length = |
| | | | 200 bases or |
| | | | greater; fastx E |
| | | | value = 1.0E−8 |
| | | | or less Full |
| | | | Length |
| | | | sequences: |
| | | | fastx score = |
| | | | 100 or greater |
| BLIMPS | A BLocks IMProved Searcher that matches a | Henikoff, S. and J. G. Henikoff (1991) Nucleic | Probability |
| | sequence against those in BLOCKS, PRINTS, | Acids Res. 19: 6565-6572; Henikoff, J. G. and | value = 1.0E−3 |
| | DOMO, PRODOM, and PFAM databases to search | S. Henikoff (1996) Methods Enzymol. | or less |
| | for gene families, sequence homology, and structural | 266: 88-105; and Attwood, T. K. et al. (1997) J. | |
| | fingerprint regions. | Chem. Inf. Comput. Sci. 37: 417-424. | |
| HMMER | An algorithm for searching a query sequence against | Krogh, A. et al. (1994) J. Mol. Biol. | PFAM hits: |
| | hidden Markov model (HMM)-based databases of | 235: 1501-1531; Sonnhammer, E. L. L. et al. | Probability |
| | protein family consensus sequences, such as PFAM. | (1988) Nucleic Acids Res. 26: 320-322; | value = 1.0E−3 |
| | | Durbin, R. et al. (1998) Our World View, in a | or less |
| | | Nutshell, Cambridge Univ. Press, pp. 1-350. | Signal peptide |
| | | | hits: Score = 0 |
| | | | or greater |
| ProfileScan | An algorithm that searches for structural and sequence | Gribskov, M. et al. (1988) CABIOS 4: 61-66; | Normalized |
| | motifs in protein sequences that match sequence patterns | Gribskov, M. et al. (1989) Methods Enzymol. | quality score ≧ |
| | defined in Prosite. | 183: 146-159; Bairoch, A. et al. (1997) | GCG-specified |
| | | Nucleic Acids Res. 25: 217-221. | “HIGH” value |
| | | | for that |
| | | | particular |
| | | | Prosite motif. |
| | | | Generally, |
| | | | score = |
| | | | 1.4-2.1. |
| Phred | A base-calling algorithm that examines automated | Ewing, B. et al. (1998) Genome Res. | |
| | sequencer traces with high sensitivity and probability. | 8: 175-185; Ewing, B. and P. Green | |
| | | (1998) Genome Res. 8: 186-194. | |
| Phrap | A Phils Revised Assembly Program including SWAT and | Smith, T. F. and M. S. Waterman (1981) Adv. | Score = 120 or |
| | CrossMatch, programs based on efficient implementation | Appl. Math. 2: 482-489; Smith, T.F. and M.S. | greater; |
| | of the Smith-Waterman algorithm, useful in searching | Waterman (1981) J. Mol. Biol. 147: 195-197; | Match length = |
| | sequence homology and assembling DNA sequences. | and Green, P., University of Washington, | 56 or greater |
| | | Seattle, WA. | |
| Consed | A graphical tool for viewing and editing Phrap assemblies. | Gordon, D. et al. (1998) Genome Res. 8: 195-202. | |
| SPScan | A weight matrix analysis program that scans protein | Nielson, H. et al. (1997) Protein Engineering | Score = 3.5 or |
| | sequences for the presence of secretory signal peptides. | 10: 1-6; Claverie, J.M. and S. Audic (1997) | greater |
| | | CABIOS 12: 431-439. | |
| TMAP | A program that uses weight matrices to delineate | Persson, B. and P. Argos (1994) J. Mol. Biol. | |
| | transmembrane segments on protein sequences and | 237: 182-192; Persson, B. and P. Argos (1996) | |
| | determine orientation. | Protein Sci. 5: 363-371. | |
| TMHMMER | A program that uses a hidden Markov model (HMM) to | Sonnhammer, E. L. et al. (1998) Proc. Sixth Intl. | |
| | delineate transmembrane segments on protein sequences | Conf. on Intelligent Systems for Mol. Biol., | |
| | and determine orientation. | Glasgow et al., eds., The Am. Assoc. for Artificial | |
| | | Intelligence Press, Menlo Park, CA, pp. 175-182. | |
| Motifs | A program that searches amino acid sequences for patterns | Bairoch, A. et al. (1997) Nucleic Acids | |
| | that matched those defined in Prosite. | Res. 25: 217-221; | |
| | | Wisconsin Package Program Manual, version 9, page | |
| | | M51-59, Genetics Computer Group, Madison, WI. | |

The application's sequence listing, which the Patent Office published only in electronic form, follows.

SEQUENCE LISTING (422 sequences)

SEQ ID NO: 1 - DNA, 543 bp, Homo sapiens
  misc_feature: Incyte ID No: LG:1040582.1:2000FEB18
cggccgtccagacgtcgtggtggagtgagaggttcccagggaggaatgtgcaaagtcctgttggttctacccctcttctacttcgaggaaggggtccgcgtcgcgcgtttctggaacgggctctctccctggggtggctgctgttctccgccagattaagccgggcctgctggctcagtactggagtgcagagctgaattctggccactttgtcttctccacagcctgtgctcattgccaaggggacaatgacggcctccagtgtcctcctgcacactggacagaagatgcctctgattggtctggggacatggaagagtgagcctggtcaggtgaaagcagctattaaatatgcccttagcgtaggctaccgccacattgactgtgcttctgtatatggcaatgaaactgagattggggaggccctgaaggagagtgtggggtcaggcaaggcagtccctcgagaggagctgtttgtgacatccaagctgtggaatactaagcaccaccctgaggatgtagaacctgccctccggaagacac

SEQ ID NO: 2 - DNA, 633 bp, Homo sapiens
  misc_feature: Incyte ID No: LG:453570.1:2000FEB18
cctgcacgctcctccgcctgattcccagcgcgtcgcacttcaagagattcgatcgggttcgccggttcgcgcccgccgccatggcgacttcctcaggaccaaaggaggcgccagcgaataaccctgggctccagaccgaggtcgaccccgccaccaaaggctacttcttgcaacaaacgatgttacgtgtgaaggacccaaaagtgagccttgacttctactcacgtgtgatgggcatgtcgttgctgaaaaggttggattttgaagagatgaaattcagtttgtattttctaggttacgaggatgtgaccttagcccctgatgatcatatcaagcggactgaatggacttttaggcaaaaagctactcttgagctcacccacaactggggcacggaaaatgaccctgaattcaaaggttaccataatgggaactcagaccctcgtggttttggtcatataggagtaactgtggatgatgtccactaggcatgtgaacgctttgaacgtcttggggttgagtttgtgaagaaacctgatgatggaaaaatcaatggcatcgctttcatcaaagatcctgatggttatggatcgaaatatttgaccagacgattgggacggttacttcttcagc

SEQ ID NO: 3 - DNA, 1674 bp, Homo sapiens
  misc_feature: Incyte ID No: LG:408751.3:2000FEB18
tagggacccaggatggcagatccgggaccgggctgggctggcttggaacatgcttgccaactcagccagcgtgaggatcctcatcaagggaggcaaggtggtgaacgatgactgcacccacgaggctgacgtctacatcgagaatggcatcatccagcaggtgggccgcgagctcatgatccctggcggggccaaggtgattgatgccacaggaaaactggtgatccctggtggcatcgacaccagcacccacttccaccagaccttcatgaatgccacgtgcgtggacgacttctaccatgggaccaaggcagcactcgtcggaggcaccaccatgatcatcggccacgtcctgcccgacaaggagacctcccttgtggacgcttatgagaagtgccgaggtctggccgaccccaaggtctgctgtgattacgccctccacgtggggatcacctggtgggcacccaaggtgaaagcagaaatggagacactggtgagggagaagggtgtcaactcgttccagatgttcatgacctacaaggacctgtacatgcttcgagacagtgagctgtaccaagtgttgcacgcttgcaaggacattggggcaatcgcccgcgtccatgctgaaaatggggagcttgtggccgagggtgctaaggaggcactggatttggggatcacaggcccagaaggaatcgagatcagccgtccagaggagctggaagctgaagccactcatcgtgttatcaccattgcaaacaggactcactgtccaatctacctggtcaacgtgtccagtatctcggctggtgacgttatcgcagctgctaagatgcaagggaaggttgtgctggcggagaccaccactgcacatgccacgctgacaggcttacactactaccaccaggactggtcccacgcggctgcctatgtcacggtgcctcccctgagactggacaccaacacctcaacctacctcatgagcctgctggccaagtaaggcgtttcagcagcacattgcagggatgtgtacatctttaggaagacgtcatagagggcccaggaaacaaatctgagctaggtttgatttcattgtgcccataggatcattgtgcttttcttaccttctctgagcccatcagataattgccatcctattgggattttatgaccgcttgatatggagtgagatcttctgaagtataagagtgaagagcacatatagaactgtgaaccgtggttattcggaatttcaaaggacattgatctcttactgctaaagcccagtggggagctgcagaacgtggcctgtgacttatcctagaatgtaggggtcctttctgtttcttttgttcacctctccctcttcttgttggctcccgtgtgccccttgtctgtacatccctccttctgtgggtttctcctcctttccttcccctttccctttttcttctgcactttctccccctttccttcccacacccttcctccagatctcctttctccagctcttctatttctgacactgctttttccccatgcaatcccaatctaaaggaaatggtttgatgaacggtctgaattcagtgggacccaattatggaagggtttctgttttatcccaataactgcttgcagcttctttctctctcctattaacatttttggggccag

SEQ ID NO: 4 - DNA, 1248 bp, Homo sapiens
  misc_feature: Incyte ID No: LI:090574.1:2000FEB01
  unsure 1148, 1234: a, t, c, g, or other
cgcgtacgtaagctcggaattcggctcgagttccaccccgagggaccatgtcgaggctcagctggggataccgcgagcacaacggtcctattcactggaaggaatttttccctattgctgatggtgatcagcaatctccaattgagattaaaaccaaagaagtgaaatatgactcttccctccgaccacttagtatcaagtatgacccaagctcagctaaaatcatcagcaacagcggccattccttcaatgttgactttgatgacacagagaacaaatcagttctgcgtggtggtcctctcactggaagctacaggttacggcaggttcaccttcactgggggtccgctgatgaccacggctccgagcacatagtagatggagtgagctatgctgcagagctccatgttgttcactggaattcagacaaataccccagctttgttgaggcagctcatgaaccagatggactggctgtcttgggagtgtttttacagattggtgaacctaattcccaactgcaaaagattactgacactttggattccattaaagaaaagggtaaacaaactcgattcacaaattttgacctattgtctctgcttccaccatcctgggactactggacatatcctggttctcttacagttccacctcttcttgagagtgtcacatggattgttttaaagcaacctataaacatcagctctcaacagctggccaaatttcgcagtctcctgtgcacagcggagggtgaagcagcagcttttctggtgcatcacttggccaccattccctgtgggagcagctctgccacctgctctgggcattgttaatcctctgggtcccaaactgaatccactgggccttgcttttgctgctgctagggaagagaaggcagagaagtattcattaacagtaaacattagttgtgctcagccctctgcagtctacctctgctaggcataaaataaggagaagtggcctcgggtgaaagcaggtttggattaaaatttcctaatgccaaggctgcttgaacgttggattactcttcacctatacttctataaatgtgtaatcttgttataagttttccacaagtggcatagagtctcttctgtgaacactgttcttctgtgcaggtgggntggactagatcaagggtcttcagcagttttgatcagccagtggatttcaaagacccattaattaaaagctttttaatcaaaagctntcttacaaagggcg

SEQ ID NO: 5 - DNA, 1451 bp, Homo sapiens
  misc_feature: Incyte ID No: LI:229932.2:2000FEB01
taatgattcaaagataattttataaaagccaaagtaacttgtagctaatatataaaatacttttgaccaggaacttttaaagtggatgctatgaagatagagagtgtttttacacattgtttattgattttaatttcactttttctctccttagggtgtgattaggcccactgggggatacgctgtcatgctacactggtcaatgtcttccatatacggacttcaacccggagaggtgtggtgggcagcttctgacttaggctgggttgttggacattcctatatctgctatggacctcttcttcatgggaacacaacagttttatatgaggggaagcctgtgggaacaccagatgctggcgcttatttccgtgtgcttgcagagcatggagtagctgccttgtttacagcaccaactgcaattagagcaatccgtcaacaggaccctggggcagctttggggaagcagtactctctgacaaggttcaaaacattatttgtggctggagaacgatgtgatgtagagaccctggaatggtccaaaaatgtcttcagagtacctgtcttagaccattggtggcaaactgagactggatctccaattactgcgtcatgtgttggattaggcaattctaaaacacctccaccagggcaagcaggaaaaagcgcccaggatacaatgttatgattttggatgacaacatgcaaaactgaaggctcggtgtttaggaaatattgtggtaaaagttaccattgccacctggggctttttcaggactctggaagaatcaggaagcattcaagcatttatactttgaaaaatttcctggatattatgataccatggatgctggttacatggatgaagaaggctatttgtatgttatgtctcgagtggatgatgtaataaatgttgcaggtcacagaatttctgcaggcgccattgaagagtcaatcctttcccatggtaccgtggcagactgtgctgttgttggcaaggaagatcccttaaaaggtcatgtccccttagcactctgtgtattgagaaaagatataaatgcaacagaggagcaagttttggaagaaattgtgaaacacgttagacagaacattggccctgtggctgcttttcgaaatgcagtgtttgtcaaacagctacccaaaaccagatctggcaagatcccccgatcagctttatctgccattgtcaatggcaagccatacaagataacttctacaattgaagaccccagcatttttggccacgtagaagaaatgctgaagcaagcataatgagtttgtcttattcctattttgagttgatttaatttcttaattgaaattaaattatttgagttgtttctcagaaataaatatttcagtagaaattacttgcaaaatgaaatgtgaattgtaaaacttggcctaaacaaatctaatgaaaacatgtg

SEQ ID NO: 6 - DNA, 2615 bp, Homo sapiens
  misc_feature: Incyte ID No: LI:332176.1:2000FEB01
actgataaaacgatctaaagggaaggagagaccctttgttcttacacgttctttctttgctggatcacaaaagtatggtgccgtgtggacaggcgacaacacagcagaatggagcaacttgaaaatttctatcccaatgttactcactctcagcattactgggatctctttttgcggagctgacataggcgggttcattgggaatccagagacagagctgctagtgcgttggtaccaggctggagcctaccagcccttcttccgtggccatgccaccatgaacaccaagcgacgagagccctggctctttggggaggaacacacccgactcatccgagaagccatcagagagcgctatggcctcctgccatattggtattctctgttctaccatgcacacgtggcttcccaacctgtcatgaggcctctgtgggtagagttccctgatgaactaaagacttttgatatggaagatgaatacatgctggggagtgcattatgggttcatccagtcacagaaccaaaagccaccacagttgatgtgtttcttccaggatcaaatgaggtctggtatgactataagacatttgctcatggggaaggagggtgtactgtaaagatcccagtagccttggacactattccagtgtttcagcgaggtggaagtgtgataccaataaagacaactgtaggaaaatccacaggctggatgactgaatcctcctatggactccgggttgctctaagcactaagggttcttcagtgggtgagttatatcttgatgatggccattcattccaatacctccaccagaagcaatttttgcacaggaagttttcattctgttccagtgttctgatcaatagttttgctgaccagaggggtcattatcccagcaagtgtgtggtggagaagatcttggtcttaggcttcaggaaggagccatcttctgtgactacccactcatctgatggtaaagatcagcctgtggcttttacgtattgtgccaaaacatccatcctgagcctggagaagctctcactcaacattgccactgactgggaggtccgcatcatatgacaaagaactgcccctggtgatgtgagcagggacctgcctgcccctttcaacctttcccctcaccttttttgagatttttgctgcaatctgtttgccttccctgaatcaaaataatctttcattcgtcaccattatactaatgaacaatagatttcatgtttcaaaatttcagattttacatgttatagatgtactaacaatattccttgtatcaaacatctccttttctccctgatacatagccctgagacatttatagcgttcaggagtcttctattgcttccattccttcagcagggctgcgtgggtctgttttaacgtgggccaagcctacctgggcagcccatttgccagggcttgcctcaggccatgcagcattggcgctctggctgcagcagctgagttgctcaaggccagtgtccaagtggacagcagcctctggtactccccccatttatcttccacccacatggagctgggcagagcagccctcttctgtgtgcactgcatacgctgcagccgtgggagttattctcccctagagatcgacttggcagcacgaaggattcttttctctttcatgcttctcaggctcaatagtttctaattaatcttaaaatccatgtcttttacattgtttttttaattaagtgctgtttactaaccaaataatatttataacatgagtaagctataattaataacaatgaaataaatacccatgtacccaccactggacttcagaagtagaactcatgactgggactaggatgaggcaagggagaccctggccttgggcacaaaatgtaagggatgccaaaaaaatacagtaatcaaagtaagtaatatttcaatccaatatttttaaaaatcagaattaatgcaaaaaaaaccatgatgaacaaaatattaaaatttaaaataaagacaggattagtattactgagttttccttttgtcccaggctctaatatggcttggcatggggcagaacattacaacataccagtcgtgtcatggtgcccaaggctccacagacctcagtggctccctgctgcctgccacagcatctgttttagcagcctcgactcctcagcactcctcagcacacacctcttcttatcaggcttcctccacttagcaacttgctaacggccacctctgtgccttctgatccctgggcgccaatatcctcctgcccttaccatccttccaggcccaacttaaatcccactttcccatgaagcctaactgcgtgaacacccctacccccatacccattagcagtgattttgcccttccccgtaatgctgtcccacttataactgtgctctacttagcattctcagggatcataccttaatgttttcagtatgtctgcgttctcctactagattgtatgtccctcaagagcatgttctgtttctcttctgtctgacagagcactattatacctgactttcagtaactgttagctgtgattagttagctggtggatttaattgattaaaaaattacgattgaatgtaaaaaa

SEQ ID NO: 7 - DNA, 491 bp, Homo sapiens
  misc_feature: Incyte ID No: LI:403248.2:2000FEB01
gcctggcaggaggaggaaaatggttccacctccaagaccatcgtgtaccaccttgatgagggcgtgtatgggatcttcaactcagtcctgtttgacaacatctgccctacccccatcctgcagaagtctaagaaccactcaccctgctacatgtctctagagtccattcatttcattgccgtgtagcgctcttttgaaaccatccacggagcagcccctgtacagcagcagcctgtggggcccggcggttgatggctgtgattgcgtggctgagggcctgtggctgccgcaactacacgtaggggactggctggtctttgacaacatgggcgcctacactgtgggcatgggttcccccttttgggggacccaggcctgccacatcacctatgccatgtcccgggtggcctgggaagcgctgcgaaggcagctgatggctgcagaacaggaggatgacgtggagggtgtgtgcaagcctctgtcctgcggct

SEQ ID NO: 8 - DNA, 2309 bp, Homo sapiens
  misc_feature: Incyte ID No: LG:220992.1:2000MAY19
  unsure 1738: a, t, c, g, or other
aattaaagatggctgcgcccatgtaacatcactagcgaccggtgacctctttttcccccttgcctggctcctgtggtggcaggctgggcacgaggaccatgctgggccggagcctccgagaagtttctgcggcactgaaacaaggccaaattacaccaacagagctctgtcaaaaatgtctctctcttatcaagaagaccaagtttctaaatgcctacattactgtgtcagaagaggtggccttaaaacaagctgaagaatcagaaaagagatataagaatggacagtcacttggggatttagatggaattcctattgcagtaaaagacaatttcagcacttctggcattgagacaacatgtgcatcaaatatgctgaaaggttatataccaccttataatgctacagtagttcagaagttgttggatcagggagctctactaatgggaaaaacaaatttagatgagtttgctatgggatctgggagcacagatggtgtatttggaccagttaaaaacccctggagttattcaaaacaatatagagaaaagaggaagcagaatccccacagcgagaatgaagattcagactggctgataactggaggaagctcaggtgggagtgcagctgctgtatcggcgttcacatgctacgcggctttaggatcagatacaggaggatcgaccagaaatcctgctgcccactgtgggcttgttggtttcaaaccaagctatggcttagtttcccgtcatggtctcattcccctggtgaattcgatggatgtgccaggaatcttaaccagatgtgtggatgatgcagcaattgtgttgggtgcactggccggacctgaccccagggactctaccacagtacatgaacctattaataaaccattcatgcttcccagtttggcagatgtgagcaaactatgtataggaattccaaaggaatatcttgtaccggaattatcaagtgaagtacagtctctttggtccaaagctgctgacctctttgagtctgagggggccaaagtaattgaagtatcccttcctcacaccagttattcaattgtctgctaccatgtattgtgcacatcagaagtggcatcgaatatggcaagatttgatgggctacaatatggtcacagatgtgacattgatgtgtccactgaagccatgtatgctgcaaccagacgagaagggtttaatgatgtggtgagaggaagaattctctcaggaaactttttcttattaaaagaaaactatgaaaattattttgtcaaagcacagaaagtgagacgcctcattgctaatgactttgtaaatgcttttaactctggagtagatgtcttgctaactcccaccaccttgagtgaggcagtaccatacttggagttcatcaaagaggacaacagaacccgaagtgcccaggatgatatttttacacaagctgtaaatatggcaggattgccagcagtgagtatccctgttgcactctcaaaccaagggttgccaataggactgcagtttattggacgtgcgttttgtgaccagcagcttcttacagtagccaaatggtttgaaaaacaagtacagtttcctgttattcaacttcaagaactcatggatgattgttcagcagtccttgaaaatgaaaagttagcctctgtctctctaaaacagtaaacatatcttacaaattaaaatgacttttaggctgggattacaggcgttagcanccatgcccggcttaaaactggctttttaaatggaacttttgtttattttattttatttcttccttccctttttttacaatttgaatggaacttttagctttgccgtgctgcgttaggaaatgaagacacatcctgaactggaacaagacttgccaggggtgaactggcaaactttcctgtactaacttcacaatccaaaccacacgatgttatttcttatagtggctgtaaaggaagaagctgcagggcttaaatgtactcttttccagtttctggatttatctgtagtttacttttattttgtcgctttggtcgtgcattgaatgttctcttgactttcaaagatttgaaaatatatttaatatagtaattcagagggggtgaactcttgcatggtttgattaaaattatagccttaaaaagcattgttagttttagggcagatagcctttggattcaagtatatcttgtctttcatgtatcaattcaactgaccatttgaccttaaaagttggtatttttaattccgaattatttgtgtgctaccgtaaatcaggcgtattgcttgtca

SEQ ID NO: 9 - DNA, 930 bp, Homo sapiens
  misc_feature: Incyte ID No: LG:1094571.1:2000MAY19
cgcacgccggcggcgcggaggccggctctgcgcttcgggccgccccctccccccaccccgctcacactcggcacttacttcggctgtctccgctgccctccagcggagacgcagctcctcaggcgcccggcggtatttgttgggtcggcggcgtcagggattcgcagtggcctgtggtcggcgtcgtccggccactggtgcgcccccgcggcaggcagagctcacgctcctgtcccccggctggtccggggtctgggcgccgcgtcgacggcggctccgcaggacgcgcagaccgggccgcagcccatgccccgagcggactgcattatgaggcacctgccttacttctgccggggtcaagtggtgcggggcttcggccgcggctccaagcagctgggcatccccacagctaattttcctgagcaagtggtagataatcttccagctgatatatccactggtatttactatggttgggccagtgttggaagtggagatgtccataagatggtggtgagcataggatggaacccatattacaagaatacgaagaagtctatggaaacacatatcatgcataccttcaaagaggacttctatggggaaatcctcaatgtggccattgttggctacctgagaccagaaaagaactttgattctttagagtcacttatttcagcaattcaaggtgatattgaagaagctaagaaacgactagagttaccagaacatttgaaaatcaaagaagacaatttcttccaggtttctaaaagcaaaataatgaatggccactgatgaaaaattgtattatttattcattcactgttttctagtgtttctgtgtttattactgttcagcatcatcttggttatatactgaaaatcaaacactttactacagttgtgaattagtttaaaccgtacaatgtt

SEQ ID NO: 10 - DNA, 2700 bp, Homo sapiens
  misc_feature: Incyte ID No: LI:350754.4:2000MAY01
gcactgtccgtgccattcccagaggagcctgagaagaggcagaggaagggcgaaacatggctgctctaggagtccagagtatcaactggcagaaggccttcaaccgacaagcgcatcacacagacaagttctccagccaggagctcatcttgcggagaggccaaaacttccaggtcttaatgatcatgaacaaaggccttggctctaacgaaagactggagttcattgacaccacagggccttacccctcagagtcggccatgacgaaggctgtgtttccactctccaatggcagtagtggtggctggagtgcggtgcttcaggccagcaatggcaatactctgactatcagcatctccagtcctgccagcgcacccataggacggtacacaatggccctccagatcttctcccagggcggcatctcctctgtgaaacttgggacgttcatactgctttttaacccctggctgaatgtggatagcgtctttatgggtaaccatgctgagagagaagagtatgttcaggaagatgccggcatcatctttgtgggaagcacaaaccgaattggcatgattggctggaactttggacagtttgaagaagacattctcagcatctgcctctcaatcttggataggagtctgaatttccgccgtgacgctgctactgatgtggccagcagaaatgaccccaaatacgttggccgggtgctgagtgccatgatcaatagcaatgatgacaatggtgtgcttgctgggaattggagcggcacttacaccggtggccgggacccaaggagctgggacggcagcgtggagatcctcaaaaattggaaaaaatctggcttcagcccagtccgatatggccagtgctgggtctttgctgggaccctcaacacagcgctgcggtctttggggattccttcccgggtgatcaccaacttcaactcagctcatgacacagaccgaaatctcagtgtggatgtgtactacgaccccatgggaaaccccctggacaagggtagtgatagcgtatggaatttccatgtctggaatgaaggctggtttgtgaggtctgacctgggccccccgtacggtggatggcaggtgttggatgctaccccgcaggaaagaagccaaggggtgttccagtgcggccccgcttcggtcattggtgttcgagagggtgatgtgcagctgaacttcgacatgccctttatcttcgcggaggttaatgccgaccgcatcacctggctgtacgacaacaccactggcaaacagtggaagaattccgtgaacagtcacaccattggcaggtacatcagcaccaaggcggtgggcagcaatgctcgcatggacgtcacggacaagtacaagtacccagaaggctctgaccaggaaagacaagtgttccaaaaggctttggggaaacttaaacccaacacgccatttgccgcgacgtcttcgatgggtttggaaacagaggaacaggagcccagcatcatcgggaagctgaaggtcgctggcatgctggcagtaggcaaagaagtcaacctggtcctactgctcaaaaacctgagcagggatacgaagacagtgacagtgaacatgacagcctggaccatcatctacaacggcacgcttgtacatgaagtgtggaaggactctgccacaatgtccctggaccctgaggaagaggcagaacatcccataaagatctcgtacgctcagtatgagaggtacctgaagtcagacaacatgatccggatcacagcggtgtgcaaggtcccagatgagtctgaggtggtggtggagcgggacatcatcctggacaaccccaccttgaccctggaggtgctgaacgaggctcgtgtgcggaagcctgtgaacgtgcagatgctcttctccaatccactggatgagccggtgagggactgcgtgctgatggtggagggaagcggcctgctgttgggtaacctgaagatcgacgtgccgaccctagggcccaaggagcggtcccgggtccgttttgatatcctgccctcccggagtggcaccaagcaactgctcgccgacttctcctgcaacaagttccctgcaatcaaggccatgttgtccatcgacgtagccgaatgaagggcgctggtggcctcccgtacaaacttggacaacacggagcagggagagctcaccatgggaatgaaccccccgcccatgctgtccggcctgggtaaaccctctccatctcccaaggctgccagacatggacctccaggctccagcacatccccctctcctctcccccaggttgggtctgggtccaccctgtcctatgacttgatcacttttgcacattgcctggccgcttctccccagagctgcctgctctgtgagccccacagccctgctcattcctcacgcccttcaatgctgcaggatggactggctcctgacccagggactctccaaacgggatacaggagagaagctggtctagactgtttgctgatccccaacctgcacggggcattcctgcttctcatctcaggccaccacagagggcaggggatggttagtcacctgccccagcactcacaccctaactcaaaataaatgttaaataagtgcgatcacacagcaccgactctacctgactgctgttgcacctaaggtggtgaaggagagaggaggctgtggc

SEQ ID NO: 11 - DNA, 534 bp, Homo sapiens
  misc_feature: Incyte ID No: LI:255828.29:2000MAY01
ctgtaccattggcccagcttcccgatcagtggagacgttgaaggagatgattaagtctggaatgaatgtggctcgtctgaacttctctcatggaactcatgagtaccatgcggagaccatcaagaatgtgcgcacagccacggaaagctttgcttctgaccccatcctctaccggcccgttgctgtggctctagacactaaaggacctgagatccgaactgggctcatcaagggcagcggcactgcagaggtggagctgaagaaggcagccactctcaaaatcacgctggataacgcctacatggaaaagtgtgacgagaacatcctgtggctggactacaagaacatctgcaaggtggtggaagtgagccgactgcatcatgctgtctggagaaacagccaaaggggactatcctctggaggctgtgcgcatgcagcacctgatagctcgtgaggctgaggcagccatgttccaccgcaagctgtttgaagaacttgtgcgagccttaagtcactccacagacctcatggaag

SEQ ID NO: 12 - DNA, 2195 bp, Homo sapiens
  misc_feature: Incyte ID No: LI:1190263.1:2000MAY01
ccacgctgtcgggacattaatttggtgccctacactgtggggcctcagaaaagactcagaatccttggacgcagttggccgaacccggagcttagttaacccgcagggccatttggaagccctcccgtggctttaggtttctcctccatgtggaacctgaacaacaagaaggtattccaagcttgcacaatggagtcgcccaggagacccttggtcttttcatgttctttggtgtgtggcacttctttgaacactatggccagtgcacacatgggtgcattgacgacaaggcctaatattgtcctaaatccatggttgatgacctggggtatgggagatctgggctgctacggcaatgacaccatgcaggacgcctcacattcgaccgccttgccagggaaggcgtgcagactgactcagcacatctctgccggctccctctgcagcccaaagccggtcccgggtcctgtgagggagaagataccccatccggatcacggtaataggttactagtgggtaatagaagtgtgtttccaaatatcttgcagtccccgcgaggcctccctcttaatgagacaacacttgcagccttgttaaaagaagcaaggatacagcacggggcttataggcaaatggcaccaaaggtttgcactggcgattcccagaagtgagccatgtgccacccatccatataattagtggcgttttgactaactaactaatgtgcatgcctgttcacctctctgttgacatgctgctggccgggaccccctctcgttacaacggaattagcctttgagagtcagctctggctctgtgtgcagctagttgccattgccatcctcaccctaacctttgggaagctgagcggctgggtctctgttccctgggctcctgatcttctccatgattctgtttattttcctcttgggctatgcttggttctccagccacacgtcccctttatactgggactgcctcctcatgcgggggcacgagatcacggagcagcccatgaaggctgaacgagctggatccattatggtgaaggaggcgatttcctttttagaaaggcacagtaaggaaactttccttctctttttctcctttcttcacgtgcacacacctctccccaccacggacgatttcactggcaccagcaagcatggcttgtatggggataatgtggacgagatggactccatggtgggcaagattcttgatgctatcgatgattttggcctaaggaacaacacccttgtctactttacatcagatcacggagggcatttggaagctaggcgagggcatgcccaacttggtggatggaatggaatatacaaaggtggaaaaggcatggggggctgggaaggtggaatccgcgtcccaggaattgtccgatggcctggaaaggtaccagctggacggttgattaaggaacctacaagtttaatggatattttaccaactgtcgcatcagtgtcaggaggaagtctccctcaggacagggtcattgacggccgagacctcatgcccttgcttgcagggcaacgtcaggcactcggagcatgaatttcttttccactactgtggctcctacctgcacgccgtgcggtggatccccaaggacgacagtgggtcagtttggaaggctcagtatgtgacccgggtattcaagccaccagcttctggtggctgctatgtcacctcattatgcagatgttccggagaacagggttacctaccaaaacccccttcttgcttcttcgatctctccaggaacccctcagagtccacacccttgacacgtgccacagagcccctctatgatttggtgattaaaaaggtggccaacgccctgaaggaacacccaggaaaccatcgtgcttgtgaccataccaactttcagaaattgaatcagggcaggaggtggttgaagctttggtggtggggtgtccccattgggtctgtgtgacagggaagaggaagtctctaagcctcggggtcctaaggagaagagatatttacaatcaggctaccagaggaagcctggggtcctaacgagaagagataattacaatcaggctaccaaaggaagcactaactttggtgctttcaagttggcaaggagtgcatttaatagtcaataaattcatctaccattccagattattaaaggcccactggtagttcc

SEQ ID NO: 13 - DNA, 435 bp, Homo sapiens
  misc_feature: Incyte ID No: LG:270916.2:2000FEB18
gaagttttcctccaacggcttatggccctctacgtggcttctcactacaagaactctcccaatgatctccagatgctctccgatgcacctgctcaccatctcttctgccttctgcctcctgtgccccccacccagaatgcccttccagaagtgcttgctgttatccaggtataggagcagaggcgtccttgtggcagtgatttggggaaccactgaggcatcaggaattagtggcttaataactgcattgtgggagttttgaaactgtggagtcctggtctggaaccaaggggctgggtctgctgagacaggtgactagggtgcactggaagaggttagcgccactagacacccaaagctccactgttgacggacgggggaaaagccagaaccgaccgctctcttatttgactcacagctttcttccacaaacag

SEQ ID NO: 14 - DNA, 1574 bp, Homo sapiens
  misc_feature: Incyte ID No: LG:999414.3:2000FEB18
tagattcaattcatttggaaacacagctcccatttttgagtgtgcatgtacttttatgaagaaatgatgtcagaaaaccgaaggatgatgataaatactaaaagtaacaggcatgtgaaaaggtcttccgattgagaactataaggtttgatttcattttcagataatggggtcctagctcttgtgtcgtccttttacatattctacatcaatggaagttgtagcaccgtgtcagaataaagtagagtgtatttcatggcttcttaatttctttcaattagactgagatctttttcttcaagagagaaggacactgtcattgcattgtatttttttctgaaaagagtaggccgtattttactgagatcacggagttgttatatgtgacgttttggtcttctaatattcttcagtggattttctctaaagtagtatgaacagaaagccttgtatagcaaaaagtaaatcacgtaataattctgagatttttggaattgtcacaactgagaaacattgctggcggtgtatggtccgcaagtgtcaagatgttccttgtgaattgctcgcatccagcattaagggctggtttttatcttttatttttccaatcctctttccttctcaaggtgtccaagacacacggagccacggaatctcacaggtgtctgagaattcctcctcctgggactctcagaggatccagaactgcagccggccctcgctttgctgtccctgtccctgtccatgtatctggtcacggtgctgaggaacctgttcagcatcctggctgtcagctctgactgccccctccacacccccatgtacttcttcctctccaacctgtgctggcctgacatcggtttcacctcggccatggttcccaagatgattgtggacacgcagtcgcatagcagagtcatctctcatgcgggctgcctgacacagatgtctttcctgctccttgttgcatgtatagaaggcatgctcctgactgtgatggcctatgactgctttgtagccatctgtcgccctctgcactacccagtcatcgtgaatcctcacctctgtgtcttcttcgttttggtgtccttttttccttagcctgttggattcccagctgcacagttggattgtgttacaattaaccatcatcaagaatgtggaaatctctaatttggtctgtgacccatctcaacttctcaaccttgcctgttctgacagcgtcatcgatagcatattcatatatttagatagtactatatttggttttcttcccatctcagggatccttttgtcttactataaaattgtcccctccattctaagaatttcatcatcagatgggaagtataaagccttctccacctgtcgctctcacctggcagttgtttgcttattttatggaacaggcattggcgtgtacctgacttcagctgtggcaccagcccccaggagtggtgtggtggtgtcagtgatgtacactgtggtcacccccatgctgaaccctttcatctactgcctgagaaaacagggacattcaaagcgcctgtggaggtgcgcagcagaacagtcga

SEQ ID NO: 15 - DNA, 849 bp, Homo sapiens
  misc_feature: Incyte ID No: LG:429446.1:2000FEB18
caggtcagagaacaaaaggcttgctgccatcttgggagtggccgccaccatcttgggagctctaagaacaaagacccacccgtaacatttggtggcaactgtacggggattctccaaagtgtttgtctcttccagaatcaaaactgtaaaactacaaattgttcttcaaatggagccccagatgcagtctatgactaagatctaccacagacccttggaccggcctgctagcccatgctccgatgttgatgacatcgaaggcgcccctcccaaggaaatctcaactgcatgacccctactacgccccaattccgcaggaagcagttagagcagtcattggccaacctccccaacagcacttgagttttcctgttgagagggagaactgagagacaggactagctggatttcccaggccaactaagaatccctaagcctatctgggaaggtgaccgtatccacctttaaacatagggcttgcaacttagctcacacccgactaatcagatagtaaggagagctcactaaaatgctaattaggcaaaaacaggaggtaaagaaatagccaatcatctattgcctgagagcacagcaggagggacaatgatcaggatataaacccaggcattcaagccagcaatggctaccctctttgggtcccctccgtttgtatgggagctctgttttcatgctattttaaagtcttgcaactgcacactcttctgatccatgtttgttacagcttgagctgagcttttgctcaccatccagcaatgctctttgccaccatcacagacccgccactgacttccatccctctggatccagcagggtgttcagctgtgctca

SEQ ID NO: 16 - DNA, 443 bp, Homo sapiens
  misc_feature: Incyte ID No: LI:057229.1:2000FEB01
aaactatcctggattgtatatatatgtatatattgtgtatatatatgtatatattatatacacatatatataaaataacaacccagtctacctgaattttcacattttcagaaaactgtattgcttgaatctaaaattgcaagacaatttattttattttattttattttacatatttttttgagacagagtcttgctctgtttcccaggttggagtgcggtggtgcggtcttggctcactgcaacctctgccttctgggatcaagtgattctcctgcctcagcctcctgagtagctgggattatagacatgcgccaccgtgcccagctgatttttgtatttttagtagagatggggtttcgccatgttagccaggctggtctggaagcattttaaaaccaaaaggtttgtatttaacttacttactaagattattgtattcc

SEQ ID NO: 17 - DNA, 1393 bp, Homo sapiens
  misc_feature: Incyte ID No: LI:351965.1:2000FEB01
  unsure 120, 765: a, t, c, g, or other
gaagctgtaaaactactaattgttcttcaaaaggagccccagatgcagtccatgactaagatctaccacagacccctggaccggcctgctagcccatgcaccgatgttaatgatatcganagcactcccccaaggaaatttcaactgcacaacccctactacaccccaattcagcaggaagcagttagagcggtcgtcagccaacctccccagcagcacttgggttttcctgttgagagcggggactgagagacaggactagctggatttcctaggctgactaagaatccctaagcctagctgggaaggtgaccgcgtctacctttaaacacggggcttgcaacttagctcacacccaaccaatcaggtagtaaagagagctcactaaaatgctaattaggcaaaaacaggaggtagagaaatagccaatcatctatcgcctgagagcacagcaggagggacaatgatccggatataaacccaagcattcgagccagcaacggctgccccctttgtgtcccctccctttgtatgggagctctgttttcactctattaaatcttgcaactgcactcttctggtctgtgtttgttacggtttgagctgagctttcgctcgccgtccaccactgctgtttgccgccatcggagacctgccgctgacttccatccctccggatctggcagggtgttcatgtgctcctgatccagagaggcacccattgccattcctgattgggctaaaggcttgccattgttcctgcangactaagtgcccgggttcatcctaatcgagctgaacactagtcgctgggttccacgattctcttccgtgacccacgacttctaatagagctataacactcaccgcacggcccaagattccattccttcgaatccgtgaggccaagaaccccaggtcagagaacatgaggcttgccaccattttggaagtggcctgccgccattttggaagtggcctgccaccatcttgggagctctgggagcaaggaccccctggtaacagtagtagatacatagaatttttaaataaacatacttatattaagggtactcttagggtctatactaagaaattttgcatgcttgtcattaaaagctttgagtccaagtcctgtgtgtgtgtatatgactttgactctaagtcaagtgtaaatgtaactgtatagatatgccatgtatataatgtaaataaaatatatacatatatttataaataaggcagtctgaaaacttgcttgctggtgaactttaaaacagcctctttctcgtgatatacccctccagtttatccagtggaaaagaaaattactgctggattaaaaacaagtgcttaggctaggtgtggtacctcatgcctgtaatttcagcac

SEQ ID NO: 18 - DNA, 884 bp, Homo sapiens
  misc_feature: Incyte ID No: LG:068682.1:2000FEB18
acagcggccaatgtctggcagtgggcacatgggggtgcgggggtgtaggtgccaagcgccatggcttagacccgagattggagtccggccgcccccccgcagccaagccgcctcctgccccccgtgcgccctaggcgccaccatgtcgggagacaaacttctgagcgaactcggttataagctgggccgcacaattggagagggcagctactccaaggtgaaggtggccacatccaagaagtacaagggtaccgtggccatcaaggtggtggaccggcggcgagcgcccccggacttcgtcaacaagttcctgccgcgagagctgtccatcctgcggggcgtgcgacacccgcacatcgtgcacgtcttcgagttcatcgaggtgtgcaacgggaaactgtacatcgtgatggaagcggccgccaccgacctgctgcaagccgtgcagcgcaacgggcgcatccccggagttcaggcgcgcgacctctttgcgcagatcgccggcgccgtgcgctacctgcacgatcatcacctggtgcaccgcgacctcaagtgcgaaaacgtgctgctgagcccggacgagcgccgcgtcaagctcaccgacttcggcttcggccgccaggcccatggctacccagacctgagcaccacctactgcggctcagccgcctacgcgtcacccgaggtgctcctgggcatcccctacgaccccaagaagtacgatgtgtggagcatgggcgtcgtgctctacgtcatggtcaccgggtgcatgcccttcgacgactcggacatcgccggcctgccccggcgccagaaacgcggcgtgctctaccccgaaggcctcgagctgtccgagcgctgcaaggccctgatcgccgagctgc

SEQ ID NO: 19 - DNA, 1116 bp, Homo sapiens
  misc_feature: Incyte ID No: LG:242665.1:2000FEB18
  unsure 1087, 1090: a, t, c, g, or other
caccacctcatttcgctttatttcacagacttccccatctcattttttatgttctatgctaatttctcaagaagaacaggcccggcaccacctctgcgcacaaccccgcgggcctggctcaggcgggagtgcggggccagcaccatgagcgccccgggcagccccgaccaggcctatgacttcctgctcaagttcctgctggtgggcgacagggacgtaggcaagagtgagatcctggagagcctgcaggatggtgcagctgagtccccgtacagccatctcggggggatcgactacaagacgaccaccatcctgctggacggccagcgggtgaagctgaagctctgggatacgtcggggcagggaagattttgtaccatattccgctcctactctcgtggtgcacaaggagtgatcctggtctacgacattgcaaaccgctggtctttcgagggtatggatcgatggattaagaagattgaggaacatgcccctggtgtccctaaaatcctggtggggaatcgcctacatctggcattcaagaggcaggtgcccagggagcaggcccaggcctacgccgagcgcctgggtgtgaccttctttgaggtcagccctctgtgcaatttcaacatcatagagtctttcacggagctggccaggatagtgctgctgcggcacaggatgaattggctcgggaggccgagcaaggtactgagcttgcaagacctctgctgccgcaccatcgtgtcctgcacacctgtgcatctggtggacaagctcccgctccccagtaccttaagaagccacctcaagtccttctccatggctaagggcctgaatgccaggatgatgcgaggcctctcctactccctcaccaccagctccactcacaaaaggagcagcctctgcaaagtgaagatcgtctgcccaccccagagcccacccaaaaactgcaccagaaacagctgcaaaatttcttaaggaaggcaccaaaaggaaacaagctggaatcgctccaggaaaaactctggttacacctggaagatggaagtcgcattgtagattcaagaaattagttttcagtttntcncgggaaccatgctgcttgggaatgtg

SEQ ID NO: 20 - DNA, 585 bp, Homo sapiens
  misc_feature: Incyte ID No: LG:241743.1:2000FEB18
ccggcccagaatgtagaaacggttaggagggacctgtgaaaaagcgggacaccaagaagagcactgttgctgtttttagtttttaaaataagaggaagcccagtgtcccatctgatgccgaggctgaaggagtctcgctcccacgagtccctgctcagccccagcagtgcggtggaggcgctggacctcagcatggaggaagaggtggtcatcaagcccgtgcacagcagcatccttggccaggactactgcttcgaggtgacgacgtcatcaggaagcaagtgcttttcctgccggtctgcagctgagcgggataagtggatggagaacctccggcgagcggtgcatcccaacaaggacaacagccggcgtgtggagcacatcctgaagctgtgggtgatcgaggccaaggacctgccagccaagaagaagtacctgtgcgagctgtgcctggacgatgtgctctatgcccgcaccacgggcaagctcaagacggacaatgttttctggggcgagcacttcgagttccacaacttgccgcctctgcgcacggtcactgtccacctgtaccgggagaccgacaag

SEQ ID NO: 21 - DNA, 2950 bp, Homo sapiens
  misc_feature: Incyte ID No: LI:034212.1:2000FEB01
  unsure 52, 132: a, t, c, g, or other
tactatattgctcagcatttctaagtattctctaagtgctctttatttatgntttaaaatagctctcttacccagctgcgaagactagaagaacttgatttaggaaacaatgaaatatataatttgccagantcaattggagccctcttacatctaaaagatctctggttggatggaaatcaactgtcagaattacctcaggaaataggaaatctgaagaacctgctgtgtttagatgtctctgaaaacaggttggaaagacttcctgaagaaatcagtggcctgacttcattaacggatttagtcatttcccagaacttattagaaacgattccggatggcattggaaaactaaagaaactgtcaatcttgaaggtggatcagaatagactcacacagttgcctgaagcagttggggaatgtgaaagtctcactgagttagttcttacagaaaatcagctcctgaccctgcctaaaagcattggaaaactaaagaagttgagcaacttgaatgcagacagaaataaattagtgtccttaccaaaagagatcggcgggtgctgcagcctcactgtgttctgtgtacgtgacaacagactaactcggatacctgcagaggtgtcacaggcaacagaacttcatgtcctggatgtggcagggaacaggttgctgcatctacctttatccctgactgccttgaagttgaaggctctgtggctatctgacaaccagtcccagcccctgcttacattccagacagacacagactacaccacaggagagaagattttaacctgtgtcttacttcctcagctgccttctgaacctacttgtcaagagaatctgcctcgctgtggtgcactggagaacttggtaaatgatgtctctgatgaagcctggaacgagcgtgctgtcaacagagtcagtgcgatccgatttgtggaggatgagaaagatgaagaagacaatgagacgagaacacttctaaggcgagccactccacacccaggggagttaaagcacatgaaaaagacagtggagaatttacggaatgacatgaatgctgctaaaggactggactcaaacaaaaacgaggtcaatcatgccattgaccgagtgaccacttctgtgtagagtttcacctccaagttttacctcctgtgtcttcctctgctgtcgagacgttcctgtctgcttcccgggagcctcacgtgctccttgtcctaaccagcccccgcgcgccatcttcccgtggagtgtggggaagctgctgtctcccaggaagtgccttactcatcccgcaaccagtcagcgcaccagtggtctcccggtgtgatttttttttttttaatttcagttgtttgtaataagtagaatacactactgtaaacatacgacctttgtttttgtcttatgttggggtaaaggaaagcaggaaggggaatttttatcctcctcccttccgtaaagtgctgggatattttgaatcccccaagttcccttggacctactgatgagagatagttttatgtatggggaaaaatggatactttttaaaccttttttggcagctcagatggtgtaaattttaaaattttgtataggtatttcataacaaaaatatgtatttcttttttgttattttatcttgaaaacggtacatattttagtatttgtgcagaaaaacaagtcctaaagtatttgtttttatttgtaccatccacttgtgccttactgtatcctgtgtcatgtccaatcagttgtaaacaatggcatctttgaacagtgtgatgagaataggaatgtggtgttttaaagcagtgttgcattttaatcagtaatctacctggtggatttgtttttaaccaaaaagatgaattatcaatgatttgtaattatatcggttgattttttttgaaaagatgaaccaaaggatttgactgctaatattttattccttacactttttttctgaataagtctctcataatgagtgcagtgtcagactgtgcctactctgatggtatgtgccatttgtaaaataaaatagagcagaaaaacacaaaaagagaacactggttcagacattcagtgggcaagtaaattatggactgcaaaataatgatttttattcaagaaagctttaaaagttttatatccagatatacaaccacaataaagcaaaataacctactatcaaaatagaaatgttgctatctttataagtgcaatttaatttgtaaatagagtttgaatcaaagtatcacaaaatactgcttcaagatttaattttaaatctgctaatttaagggatattgggaaaagttttggtgtgtttctgttgatttcttttttgtatgctgtgataaaagagaaatgaaaagtgccagtcactgtgtggtgtctaggaaaatcatatatatttttttctccaagaaataaattcatcctggacattggccatacagctttttaaaattattactttgtatgttcaagtgatagcaggtagccaaattctttgacagtgtgctctggtctgttaaatatctaaattacccgtcagttgtgagtgacctcctgtgggacttgcattcacatggggcagagcccagaattgcctttgactctggctagtaattttgggttgtggctatctggccaattggactccttataaacccgtcttcaaccaaccaaataccatacttttttttacttcctatacatttacttattgggttcacttagctttttagtctgtgtgtatgtaaatatgtgtgtattttaaaaactatttatggagctgaaagtacataacacataagtgagtttcggctggtcagttttataccttgttccctaatctgtgcataccaattttcttttctctgttttaagatttttgacatcctctattttgttttaagcttataaagataatgccact

SEQ ID NO: 22 - DNA, 1973 bp, Homo sapiens
  misc_feature: Incyte ID No: LG:344886.1:2000MAY19
gttctgccgagtggggcgccgcggccgctattgtcccgccccctgctccgcaagattcgagcctgagcggcctgggcgtctcgagaggtgagagagttggcggcgaggtctcggcggctaagcgagcgtcggcgactgtctctccgcgagaggaggcaagttggggtccaggctccaaagccggtggccgcgtaccgcggtggagccgctgtctttgaggtctgaggagagaacagacagagtctagctctttcacccaggctggagtgaagtggtgcaatctcagctcagtgcaacctccgccccctgggttcaagtgattctcctgcctcagcctccccagtggctgggattacagtgatatcctgagagaagatgggaaagggctgcaaggttgtggtttgtggattgttatctgtggggaaaactgcaattttggagcagctcctttatggaaatcatactattggaatggaagattgcgaaacaatggaagatgtatacatggcttcagtagaaacagaccgaggagtaaaagaacagttacatctttatgacaccagaggtctacaggaaggcgtggagctgccaaagcattatttttcatttgctgatggcttcgttcttgtgtacagtgtgaataaccttgaatcctttcaaagagtggagcttctgaagaaagaaatcgataagttcaaagacaaaaaagaggtagcaattgtggtattaggaaacaaaatcgacctttctgagcagagacaagtggacgctgaagtggcacagcagtgggcaaaaagtgagaaagtaagactgtgggaggtgactgttacagatcggaaaactctgattgaaccattcactttattagccagtaaactttctcaaccccagagcaaatcaagctttcctttgcctgggaggaaaaacaaagggaactctaattctgagaactaaaaatcagtaatttccacaattgtatgttgaatagtgattgcctttaagtgtctgtgaacatggagtaatattactatttaaaataggccatttgtatctacctttggtccttaggaaaattcctaaggaagtcaattaatgcactttagatgttaaaagtatttgggctaaggttattattgcctgatatgaaataatatattcttattctcattgtttgaaacctgtctttgaaattagcacctttgttatttatgttgtacttgtgaaaacagtaaaatagtttggatagttatgcaaatgcacctatgtgtaacttccccccaaccccaagctgtttcggaagatatcataatcattctgtgtaacattatgcaaacttctaagcccaaacatgactttgtttttaaaaagttcattaatctaatgtctaggattataaaacatttttttgtgtctaaattggacccaaaacattgaacagtttggggtagtaagctaaatttcatcttgtggagattttgctaaacagactaagacccatgatttagctttgctcaaattagaatgtttagcatgagttgaggtaccaggtagtgttaagtaggttcatcacgctctaaggccgttttttccttagccagacccctgttgatagaccagatacttgagggcaaactgtttgctcctcctcttgaaaatgattaggcacttaaggacagtaaagctgtattttctggaaggaagactgtatcttctggaatagttttctagaaaactagtcatatacaataaaagtatcaaaaatattgggctctaatttgatctgacttagatgtctgagtttgtgttgtttctctaaagattttggcaagactcaagcaatgtggctgactgtaactttattaatttaaaaggtaggaagtaagctacttagtggtttcacctgtgaaataactattttgactgaaatgtaaaataagctattcaacaaagaacatattaaaacatcaagtaat

SEQ ID NO: 23 - DNA, 683 bp, Homo sapiens
  misc_feature: Incyte ID No: LG:228930.1:2000MAY19
gccggagcccagatgagcccagatggccggggctcaacccggagtgcacgccttgcaactcaagcccgtgtgcgtgtccgacagcctcaagaagggcaccaaattcgtcaagtgggatgatgactcaactattgttactccaattattttgaggactgaccctcagggatttttcttttactggacagatcaaaacaaggagacagagctactggatctcagccttgtcaaagatgccagatgtgggagacacgccaaagctcccaaggaccccaaattacgtgaacttttggatgtggggaacatcgggcgcctggagcagcgcatgatcacagtggtgtatgggcctgacctcgtgaacatctcccatttgaatctcgtggctttccaagaagaagtggccaaggaatggacaaatgaggttttcagtttggcaacaaacctgctggcccaaaacatgtccagggatgcatttctggaaaaagcctatactaaacttaagctgcaagtcactccagaagggcgtattcctctcaaaaacatatatcgcttgttttcagcagatcggaagcgagttgaaactgctttagaggcttgtagtcttccatcttcaagggtggaaaaagctaatgaggctgcgaaaagtgagcagagctgtggaaaggctcccccaaaacattttc

SEQ ID NO: 24 - DNA, 1435 bp, Homo sapiens
  misc_feature: Incyte ID No: LG:338927.1:2000MAY19
  unsure 1409, 1432: a, t, c, g, or other
gtgagccgaccttctgagccctcaagaaagatcagaacagattcatgggtgatttagcctatctgtcccaggccagcgtggctgagtgtgctggctggaggcctctctctctgcttcgagggtagctgagatccaccccggaaaccggcaggatgaagggggcaagtgaggagaagctggcatctgtgtccaacctggtcactgtgtttgagaatagcaggaccccagaagcagcacccagaggccagaggctagaggacgtgcatcaccgccctgagtgcaggcctcccgagtccccaggaccacgggagaagacgaatgtcggggaggccgtggggtctgagcccaggacagtcagcaggaggtacctgaactccctgaagaacaagctgtccagcgaagcctggaggaaatcttgccagcctgtgaccctctcaggatcggggacgcaggagccagagaagaagatcgtccaggagctgctggagacagagcaggcctatgtggcgcgcctccacctgctagaccaggtgtttttccaggagctgctgaagacagcccgcagcagcaaggccttcccagaggatgtggtcagggtcatcttctccaacatctcctccatctatcagttccattctcagttcttcctcccagagctgcagcggcgcctggacgactggtgaggtccaccaggagcccctgaggcctcagaccacagccctggccaggtggaggtggggagaccccagggcgctaggttcagcctcctaggcccaggcccttattgtgtggccatgcctccctggggctcggtctgtctgcacagtgaagggcttgggtgaatgagctctgagaggctgtgtgtgtgcagactgcttcctggggaaaggggtggatcaggtcctggccaagccaagtgaccaagtgactttgggacagtgaaaatagccagtgccaactgagggcttcctacacgcctggccttgggctttccctctattaactccctcaatcttcacatcagcctgctgtgtgatgacggcatcatggttatgcaagaaaccctcttgttttcacagatggccactaaagcatttaacagtgaagttacttgccttatatagtttgccacgaagtctaggatgtcctttaagatctttggcaaagaagaatgctagtaattgttaaacctagtgatgtattgattgcttaaaacatttataataaactgttgtttttttttaagataataatagccaccatacctggcgcatgcatattttttaagagtacccactggagtctaatatatagcctgggttacctgggatgaagaataaagagagcaaactaccacaagcaatggttgagcccctgtcaagtgccagtcatgatagtagtaataatantaataaacatctattgggccaanaaa

SEQ ID NO: 25 - DNA, 1508 bp, Homo sapiens
  misc_feature: Incyte ID No: LG:898771.1:2000MAY19
ggtgacccagcgacctgtgtgtcccacagcccgtccgtccctctgtcagtctccctgtcactggcatgtcctgggtggtcccagtggcaccttctaggcccggcccctggatgcggtggaggctgcccggggtgggtcagcatggggttgtccctgtgagcacagctccgggagacccgtactcagaatcctccagctctctcgcctgaggcggaaatgtgacttgggaattgtcctccatataaaggaagcaaaatcagggcctaggggctagagtgcagtggtgtgatcatagctcactgcagcctcgacctcccaggctcaagccatcttcctgcctcagcctcctgaacagctggaactgcagtgtccccaactcctgcccagccagtccacgcggtgccggctcctccagttaccgctttgtgcagaacgtgacctcggacctgcagctggcagcagagtttgcagcaaaggccgcgtcggagcagcaggcagacacgtctggaggagacagccccaaggatgagtcaaagccgccgttctcctacgcgcagctgatcgtgcaggccatctcctccgcccaggaccggcagctgaccctgagcgggatctacgcccacatcaccaagcattacccctactaccggacggccgacaaaggctggcagctgaagccgagtccccagggccggatcgcctctgaaggcccttagaacatggaactcacaggcatattgcttcccttaaaacagaagagacgcggcgcgcccgccctgcagctgcccaagcagtgtaccttccggtttcccagcacggccatcaagatccagttcacttcgctctatcacaaagaagaggccccagcctccccgctgcggccactgtacccccagatctcccctctgaagatccacatcccggagccggacctccggagcatggtcagccccgtcccctccccgacgggcaccatcagtgtccccaactcctgcccagccagtccacgcggtgccggctcctccagttaccgctttgtgcagaacgtgacctcggacctgcagctggcagcagagtttgcagcaaaggccgcgtcggagcagcaggcagacacgtctggaggagacagccccaaggtctgagcccacctggcgccgtggtgcacctggtgacccaggatcgggccatagtgacccggcgcgggcggcacagacagcccagggcctgcgggcgtgtgctcgaggtggtctcagcccacagggaatggagccgcagctggcggtagagccgtcggccctttctcgttttcgtgcccaaatcatccccgttggtcatttgctggtgacaggggtggcgccgtcaccgagggcccctcccgccacgctccttgttcatctgccgctggcagcccggcgtcaaagccttcatacagcccttgagcaggatggcgttctccttataactttgtcttagttcatttttgtccaatagctgttttcaaattgatt

SEQ ID NO: 26 - DNA, 574 bp, Homo sapiens
  misc_feature: Incyte ID No: LI:257664.67:2000MAY01
cgacctaagaattgccgggaggatggatggctggcgcgcgaattgttgcttttgctcttggctgatggttgaggaatgtagagagactgtgtggggtttgtgtgacactgcggtgccttgcagattaggtgagctttcaatctctctttaaaaggggcggcgaagaggacccgcaggctgcaaggagcaacagcgatgggtaggcacattcaaaaccagaaaaaattgttaacaaaccaaacaaacatgaagatcatactgggaaactgaggccagagacccgggaagaaaataaaaatcatttaaaggaccatcagccatattggcatacatttgtgaataacacacaatttcctgacatttgggagcaagtaaagtgcgtaacataaatttttttggccatgcttaaagtagaatgagatccagctgggggaaagttatagatttcagccttggatgatcagtttaggatttcgagaattgatgtttttccatatggtttctgttttcccccagctctccatttgaaccagctgcttgttttaaaactatctactaaattccatctacccac

SEQ ID NO: 27 - DNA, 1969 bp, Homo sapiens
  misc_feature: Incyte ID No: LI:001496.2:2000MAY01
ggggcgctgggggtgacggtgcggagccgctgccagcgctgggcgagagtcggcggccggatccgaggagcaggcgggcctgaggccgagtcagctgcgcgggcccccggatcccccgacagagacggcggcggtgtctggccaggcggtaggcgctgcctggcccgcggcggggaagatgttcagcgtagagtcgctggagcgggcggagctgtgcgagagcctcctcacttggatccagacatttaatgttggatgcaccatgccagaacccgtggaagatttaacgaatggggttgtgatggcccaggttcttcaaaagatagatcctgcatattttgatgaaaattggctaaacagaatcaaaactgaagtaggagataattggaggctaaagataagcaatttaaagaaaattttaaaaggaatcttggattataatcatgagattttaggacagcaaattaatgactttacccttcctgatgtgaaccttattggggagcattctgatgcagcagagcttggaaggatgcttcagctcatcttaggctgtgctgtgaactgtgaacagaagcaagagtacatccaagccattatgatgatggaggaatctgttcaacatgttgtcatgacagccattcaagagctgatgagtaaagaatctcctgtctctgctggaaatgatgcctatgttgaccttgatcgtcagctgaagaaaactacagaggaactaaatgaagctttgtcagcaaaggaagaaattgctcaaagatgccatgaactggatatgcaggttgcagcattgcaggaagagaaaagtagtttgttggcagagaatcaggtattaatggaaagactcaatcaatctgattctatagaagaccctaacagtccagcaggaagaaggcatttgcagctccagactcaattagaacagctccaagaagaaacattcagactagaagcagccaaagatgattatcgaatacgttgtgaagagttagaaaaaggagatctctgaacttcggcaacagaatgatgaactgaccactttggcagatgaagctcagtctctgaaagatgagatcgacgtgctgagacattcttctgataaagtatctaaactagaaggtcaagtagaatcttataaaaagaagctagaagaccttggtgatttaaggcggcaggttaaactcttagaagagaagaataccatgtatatgcagaatactgtcagtctagaggaagagttaagaaaggccaacgcagcgcgaagtcaacttgaaacctacaagagacaggtagtagaactacaaaacagattatccgaagaatcaaagaaagcagataaactagattttgaatataagcggctaaaagaaaaagttgacagtcttcaaaaagaaaaggacaggctgagaacagaaagggattctctgaaggaaaccattgaagagcttcgttgtgtacaagctcaagaaggccagctcacaacacaagggttaatgcctcttggaagtcaggagtcttcagacagtctagctgcagagattgttacacctgaaatcagggagaaacttattcgtcttcagcatgagaataagatgttaaagcttaaccaagaaggttcggacaatgaaaaaatagccttattgcagagccttctagatgatgcaaatctacgcaagaatgaactggagacagagaataggctggtgaatcaaagacttctggaagtacagtcacaagttgaagaattacaaaaatctttacaggatcaaggctcaaaagcagaagatgctatttcagtccttctaaaaaagaagcttgaagaacatctagagaagctgcatgaggccaataatgaactacagaagaagagagccattattgaagatctcgagccaagatttaacaacagctccttaaaaattgaagaattaccaagaagctttacgaaagaaag

SEQ ID NO: 28 - DNA, 2476 bp, Homo sapiens
  misc_feature: Incyte ID No: LI:1085273.2:2000MAY01
cgggccccgccgggcccatggacggcgcggccgagcgggcgccctgagcgcggtgcgggtcctcggagcacccccgaggtgagcgcaagcaaggtccggcatcatgtgctaggttattcccagtgcgaggccacacttgggccgtcggagcagcccctcctcacttcaggggtcaccctccccaagacccattgccccatgatggccggggaccggctccccaggaaggtgatggacgccaagaagctggccagcctgctgcggggcgggcctggggggccgctggtcatcgacagccgctccttcgtggagtacaacagctggcatgtgctcagctccgtcaacatctgctgctccaagctggtgaagtggcggttgcagaagggcaaggtgaccattgtggagttcatccagccggctgcacgcagccaggtggaggccactgagccacaggacgtggtggtctatgaccagagcacgcgggacgccagcgtgctggccgcagacagcttcctctccatcctggctgagcaagctggacggctgcttcgacagcgtggccatcctcactgggggcttcgccaccttctcctcctgcttccccggcctctgcgagggcaagcctgctgccctgctacccatgagcctctcccagccctgcctgcctgtgcccagcgtgggcctgacccgcatcctgcctcacctctacctgggctcgcagaaggacgtcctaaacaaggatctgatgacgcaaaatggaataagctacgtcctcaacgccagcaactcctgccccaagcctgacttcatactgcgagagccgcttcatgcgggtccccatcaacgacaactactgtgaaaaactgctgccctggctggacaagtccatcgagtacatcgataaagccaagctctccagctgccaagtcatcgtccactgtctggctggcatctcccgctctgccaccatcgccatcgcctacatcatgaagaccatgggcatgtcctccgacgacgcctacaggttcgtgaaggacaggcgcccgtccatctcgcccaacttcaacttcctgggccagctgctggagtacgagcgcacgctgaagctgctggccgccctgcagggcgacccgggcaccccctcagggacgccggagcctccgcccagtcctgccgccggggccccgctgccacggctgccaccacctacctcagagagcgctgccacagggaatgcggctgccagggagggcggcctgagcgcgggcggggagccccccgcgccccccacgcccccggcgaccagcgcactgcagcagggcctgcgcggcctgcacctctcctcggaccgcctgcaggacactaaccgcctcaagcgctccttctccctggacatcaagtctgcctacgcccctagcaggcggcccgacggccccgggccccccgaccccggcgaggccccgaagctctgcaagctggacagcccgtcgggggccgcgctgggcctgtcctcgcccagcccggacagcccggacgccgcgcctgaggcgcggcccacggccccgccggcggccccggccccccgccggctcccccgcgcgctcccccgcgcacagcctcggcctgaacttcggcgatgcggcccggcagactccgcggcacggcctctcggccctgtcggcgcccgggctgcccggccctggccagccggccggccccggggcctgggcaccgccgcttgactccccaggcacgccgtcgcccgacgggccctggtgcttcagccccgagggcgcacagggggcgggcggggtgctgtttgcgcccttcggccgggcgggcgccccgggaccaggcggcggcagcgacctgcggcggcgggaggcagcgagggctgagccccgggacgcgcggaccggctggcccgaggagccggccccggagacgcagttcaagcgccgcagctgccagatggagttcgaggagggcatggtggaggggcgcgcgcgcggcgaggagctggccgccctgggcaagcaggcgagcttctcgggcaacgttgaagtcatccaagttgtctctgacccttcggctgccttcggccccgccgcccgcagccaggcccgtaataaatgtatattatatataatgcaaagaaaggtaaatggtttaactgggaattttaatccgagaagtaaaataatttcgattttttatttatttaagctgttcattctggcaatggatttggcaacagtgcgggtggtcctcgagcttccatttttactgtctggtatttaaactgaaacatacgtttctaagcaatacgaggccaccttccagtcgcaagctgggtgccaggcctggggcccctcccagttcccccgccccaggaaacactgctgacctttgcaaaggctgccgagctttcgtgcactttttacataacaaaaaggtgaaaaaaaggaaaaaaaaa

SEQ ID NO: 29 - DNA, 2689 bp, Homo sapiens
  misc_feature: Incyte ID No: LI:333138.2:2000MAY01
aggagctggagtgggagctcaagcaggattcttcccgagtccctgggtaagacaaccctggcttcttttcttggctttagagggtctccttgcttaatgggaagcgtgcagcacctagtgagtggatttgaagagccactttgtaagcaacttgggcatttatttcagccccagttccagtcttccctgactcttttggcatcaaggcatcctcagaagcttcaactctggaggcaatgggtcgaaaggaagaagatgactgcagttcctggaagaaacagaccaccaacatccggaaaaccttcatttttatggaagtgctgggatcaggagctttctcagaagttttcctggtgaagcaaagactgactgggaagctctttgctctgaagtgcatcaagaagtcacctgccttccgggacagcagcctggagaatgagattgctgtgttgaaaaagatcaagcatgaaaacattgtgaccctggaggacatctatgagagcaccacccactactacctggtcatgcagcttgtttctggtggggagctctttgaccggatcctggagcggggtgtctacacagagaaggatgccagtctggtgatccagcaggtcttgtcggcagtgaaatacctacatgagaatggcatcgtccacagagacttaaagcccgaaaacctgctttaccttacccctgaagagaactctaagatcatgatcactgactttggtctgtccaagatggaacagaatggcatcatgtccactgcctgtgggaccccaggctacgtggctccagaagtgctggcccagaaaccctacagcaaggctgtggattgctggtccatcggcgtcatcacctacatattgctctgtggataccccccattctatgaagaaacggagtctaagcttttcgagaagatcaaggagggctactatgagtttgagtctccattctgggatgacatttctgagtcagccaaggactttatttgccacttgcttgagaaggatccgaacgagggggtaacactgtgagaagggcttgagtcatccctggattgacggtaacacagccctccaccgggacatctacccatcagtcaggcgtccagatccagaagaactttgctaagagcaagtggaggcaagccttcaacgcagcagctgtggtagcacacaatgaggaagctacacatgaacctgcacacgcccgggcgtccgcccagaggtggagaacaggccgcctgaaactcaagcctcagaaacctctagacccagctcccctgagatcaccatcaccgaggcacctgtcctggaccacagtgtagcactccctgcctctgacccaatataccctgcccagcatcgccgccggcccactgcccttggtggcaggtccctcaactgcctggtcaatggctccctccacatcagcagcagcctggtgcccatgcatcaggggtccctggccgccgggccctgtggctgctgctccaagctgcctgaacattgggagcaaaggaaagtcctcctactgctctgagcccacactcctcaaaaaggccaacaaaaaacagaacttcaagtcggaggtcatggtaccggttaaagccagtggcatgcttccactgccgggcagggcagactggagtctgtctcattatgtgattcctggagcctgtgcctatgtcacgtgcaattttccaggagacatattcaactcctctgctcctccaaacctggtgtctatccggcagagggaggaaggcagagcaagtggagcagggcttagcaggagcagtttctgggccagaagcaccatgcctgcttgccagctggggcagccccgtcataggaggcccaggagggagccccaaggcgtagaagccttggttgaagctgtgagcaggagaagcggtgcccaccagcttccagtgtctcccgtgacctggcctgctctatgccccacaccctacagtggccgtggctctgtgcagtgttacgttagatagctctcgccctgggtctgtgctgtttgtcgtgaaaagcttaaatgggctgggccaggctgtgtcaccttctccaaagcaaagcccatatgtgagcatctatcccagagatcccactctgtgcacactctctctcacatctctaaagtctccaacctcttggccagattgcgctcattaatggtcgttgcctgcccatctgccatgaataccagccagctccccatggtggtctccctggtgagctcttcaagttctaatccttaactccaggattagctcccaagtgcgctgagaaccaagcaagcacactttcttggcccttctccctgcctcaatctaaaagcagtgccacaccctccaaaggtggaatagaaagaagttcatgagtaagaggctgcaacgttgaactacttagtccatgagtccagcactgtcctccgtgcacagcagcccaaatggacgttaaccttggaagttgacttatatttaagtgtctgccaggaggttctaagtcctgcctctggttcccgttttctctccttgaaatgtgccagtcgacatccatatcttggtccgttccccaggtatgtcctcggcccgtcgcaccccgtccaggcttcatgctcagagttgtgcttaataaaatggacatatttttctctaaaaaaa

SEQ ID NO: 30 - DNA, 1391 bp, Homo sapiens
  misc_feature: Incyte ID No: LI:338927.1:2000MAY01
gtgagccgaccttctgagccctcaagaaagatcagaacagattcatgggtgatttagcctatctgtcccaggccagcgtggctgagtgtgctggcctggaggcctctctctctgcttcagacgggtagctgagatccaccccgagaaaccggcaggatgaagggggcaagtgaggagaagctggcatctgtgtccaacctggtcactgtgtttgagaatagcaggaccccagaagcagcacccagaggccagaggctagaggacgtgcatcaccgacctgagtgcaggcctcccgagtccccaggaccacgggagaagacgaatgtcggggaggccgtggggtctgagcccaggacagtcagcaggaggtacctgaactccctgaagaacaagctgtccagcgaagcctggaggaaatccttgccagcctgtgaccctctcaggatcggggacgcaggagccagagaagaagatcgtccaggagctgcttggagacatgacgcaggccatatgtggcgcgcctccacctgctagaccaggtgtttttccaggagctgctgaagacagcccgcagcagcaaggccttcccagaggatgtggtcagggtcatcttctccaacatctcctccatctatcagttccattctcagttcttcctcccagagctgcagcggcgcctggacgactggtgaggtccaccaggagcccctgaggcctcagaccacagccctggccaggtggaggttggggagaccccagggcgctttaaggttcaagcctcctaaggcgccaggcccttaattgtgtggccatgcctccctggggctcggtcactgtctgcacagtgaagggcttgggtgaatgagcttctgagaggcatgtgtgtgtgcagactgcttcctggggaaaggggtggatcaggtcctggccaagccaagtgaccaagtgactttgggacagtgaaaataagccagtgccaactgagggcttcctacacgcctggccttgggctttccctctattaactccctcaatcttcacatcagcctgctgtgtgtatgtacggctatcatggttatggcatagtaccctcttgttttctacagatgggcccacttatagctattgtaacagtgttagttacttgccttatatagtttgccacgttagttttggatgtcctttatagatctttggcaaagaagaatgctagtaaattgttaaacttagtgatgtattgattacaggcgtgagccaccatacctggggcatgcatattttttaagagtaccccctggagtttaatatatagcctgggttacctgggatgaagaataaagagagcaaactaccccaagcaatggttgagcccctgtcaagtgccagtcatg

SEQ ID NO: 31 - DNA, 1886 bp, Homo sapiens
  misc_feature: Incyte ID No: LG:335558.1:2000FEB18
  unsure 1844: a, t, c, g, or other
cattagcgctaggaagatgcgcacccggcaatgttccctcgaaggggcagcggtagtggcagcgcctctgctctcaatgcagcaggtaccggcgtcggtagtaatgccacatcttccgaggattttccgcctccgtcgctgcttcagccgccgccccctgcagcatcttctacgtcgggaccacagcctccgcctccacaaagcctgaacctcctttcgcaggctcagctgcaggcacagcctcttgcgccaggcggaactcaaatgaaaaagaaaagtggcttccagataactagcgttactcctgctcagatctccgctagtatcagctctaacaacagtatagcagaggacactgagagctatgatgatctggatgaatctcacacggaagatctctcttcttcggagatccttgatgtgtcactttccagggctactgacttaggggagcccgaacgcagctcctcagaagagaccctaaataacttccaggaagccgagacacctggggcagtctctcccaaccagccccaccttcctcagcctcatttgcctcaccttccacaacagaatgttgtgatcaatgggaatgctcatccacaccacctccatcaccaccatcagattcatcatgggcaccacctccaacatggtcaccaccatccatctcatgttgctgtggccagtgcatccattactggtgggccaccctcaagcccagtatctagaaaactctctacaactggaagctctgacagtatcacaccagttgcaccaacttctgctgtatcatccagtggttcacctgcatctgtaatgactaataggcgtgctccaagtactacaggtggaactaggtataaattctgttactggcactagtacagtaaataatgttaacattactgctgtgggtagttttaatcctaatgtgacaagcagcatgcttggtaatgttaatataagtacaagcaatattcctagtgctgctggtgtgagtgttgggcctggagttaccagtggtgttaatgtgaatatcttgagtggcatgggcaatggtactatttcttcctctgctgctgttagcagtgttcctaatgcagctgcagggatgactgggggatcggtttcaagtcagcagcaacaaccaacagttaacacttcgaggttcagagttgtgaagttagattctagttctgagccctttaaaaaaggtagatggacttgcactgagttctatgaaaaagaaaatgctgtacctgctacagaaggtgtgctgataaataaagtggtggagactgtaaagcaaaatccgatagaagtgacttctgaaagggagagcactagtgggagttcagtgagcagtagtgtcagcacactgagtcactatacagagagtgtgggaagtggagagatgggagcccctactgtggtggtgcagcagcagcagcagcaacaacgactactacagcaacaaccagctctccaaggtgtgaccctccaacagatggattttggtagcactggtccacagagtattccagcagttagtataccacagagtatttctcagtcacagatctcacaagtacaattacagtctcaagaactgagctatcagcaaaagcaaggtcttcagccagtacctctgcaagccactatgagtgctgcaactggtatccagccatcgcctgtaaatgtggttggtgtaacttcagctttaggtcagcagccttccatttccagtttggctcaaccccagctaccatattctcaggcggctcctccagtgcaaactccccttccaggggcaccaccaccccaacagttacagtatgganaacagcaaccaatggtttctacacagatggccccaggcatga

SEQ ID NO: 32 - DNA, 1540 bp, Homo sapiens
  misc_feature: Incyte ID No: LG:998283.7:2000FEB18
ctttactgtatctgtaaaacgccttatgatgaatctaagttctatattggctgtgatctttgtactaactggtatcatggagaatgtgttggcatcacagaaaaggaggctaagaaaatggatgtgtacatctgtaatgattgtaaacgggcacaagagggcagcagtgaggaattgtactgtatctgcagaacaccttatgatgagtcacaattttatattggctgtgatcggtgtcagaattggtaccatgggcgctgcgttggcatcttgcaaagtgaggcagagctcattgatgagtatgtctgtccacagtgccagtcaacagaggatgccatgacagtgctcacgccactaacagagaaggattatgaggggttgaagagggtgctccgttccttacaggcccataagatggcctggcctttccttgaaccagtagaccctaatgatgcaccagattattatggtgttattaaggaacctatggaccttgccaccatggaagaaagagtacaaagacgatattatgaaaagctgacggaatttgtggcagatatgaccaaaatttttgataactgtcgttactacaatccaagtgactccccattttaccagtgtgcagaagttctcgaatcattctttgtacagaaattgaaaggcttcaaagctagcaggtctcataacaacaaactgcagtctacagcttcttaaagttcagcgtgttaacctaacataaaacacagcaagaatctggttgtctgaactattttaaattaaggagccagatgtttttagtcaggctatcctgacaagacttgacctaaacttcgtttttattggtcataacagtccaattatattcttggccaattttgtccaacggacaagaaaaaagcaaagtcaacgacaccattatcttgtcaagatcagatggttttactatttgtggcagaagcgagaaaattttgtttattaaaaaaaaaaaagaaaaagaaagcaagaaacaatgatactgtggggtcaagtataactccatggaaatgccacgtctgctcttcagtgaagaagctggtttagagtctcaaagaaaacttttgactgtatttatttattgttgcaaaaaagatgcttttttattgctgccctcatttgtcaactaattattttttcttataaaatccagccacggttacatataatccatccatatcttatcaatgattcctgtacgtaaaagtacaagacaacctctagatgtcttttctttctatgaaaggagctgctatgtacacatgtgcacacacacacaactgcgaatcaacaatgagtttattgttcatggtagattaaaattaagcttgcataaaggttgggctaagtggtcctggactacagactctggtgacttgaatataacagtacaatttgtcaattactccacaccaggttgaaatgagtaaaatctatttgaaggtatcttctttgtaaacatttgtcagattctaatttttctttttgtattaaaattcaactatgg

SEQ ID NO: 33 - DNA, 613 bp, Homo sapiens
  misc_feature: Incyte ID No: LI:402739.1:2000FEB01
ccgccgtgggggcagagaagtccaacccctccaagcgacaccggcgggacatcaaggccgaggacgatgatcccgccgggggagtgcacgtacgcgggccggaagcggaggaggcccctgcagaaacagaggcccgccgtgggggcagagaagtccaacccctccaagcgacaccgggaccgcctcaacgccgagttggaccacctggccagcctgctgccgttcccgcctgacatcatctccaagctggacaagctttctgtcctgcgcctcagtgtcagttacctccgggtgaagagcttcttccaaggacaggggttggcagtggcagatgccgaagatgtggatgaccacacgggcgaacgaaggcccatgtcgttcaggaggccccgagcattggacacccaggccctgagacgtactcagttcggtctgcatctgttgatggtgaatattgcaggactgatagccactgaccgcctgtagtgatgtgtgaggacaatgaaggcaatggtgattcacaggcaggccagcaccatatgggtgttagttgtaaattcatggttacataacataataaatttacctacgaattcattatttataaacaaaa

SEQ ID NO: 34 - DNA, 507 bp, Homo sapiens
  misc_feature: Incyte ID No: LI:175223.1:2000FEB01
gcacattagaccatgcgagctaaatttgtgatcgcacaaaatcaagatgttagattgatgcagaagatcactccgttccaaagggaaagttttcatctcacgagtttggagctgagggcccgtggggcaacatggccgaaggcggggctagcaaaggtggtggagaagagcccgggaagctgccggagccggcagaggaggaatcccaggttttgcgcggaactggccactgtaagtggttcaatgtgcgcatgggatttggattcatctccatgataaaccgagagggaagccccttggatattccagtcgatgtatttgtacaccaaagcaaactattcatggaaggatttagaagcctaaaagaaggagaaccagtggaattcacatttaaaaaatcttccaaaggccttgagtcaatacgggtaacaggacctggtgggagcccctgtttaggaagtgaaagaagacccaaagggaagacactacagaaaagaaaaccaaagg

SEQ ID NO: 35 - DNA, 653 bp, Homo sapiens
  misc_feature: Incyte ID No: LG:981076.2:2000MAY19
  unsure 642: a, t, c, g, or other
gggcaacccgtctggaggcagcgcgcccgcgggcagcctcgttgtggctccttgggctctgttggcggcggcgctagcttcggagtctcccgcgcgcacctcagccgcctcctagcggcgcggcgctcgctcctacgcctaaaatgaccaatgtgtgatttcagtggaataaatggcgtccaaagtcacagatgctatagtctggtatcaaaagaagattggagcatatgatcaacaaatatgggaaaaatctgttgaacagagagaaatcaaggggctaaggaataaaccaaagaaaacagcacatgtgaaaccagacctcatagatgttgatcttgtaagagggtctgcatttgcaaaggcaaagcctgaaagtccttggacttctctgaccagaaagggaattgttcgagttgtatttttcccctttttcttccggtggtggttacaagtaacatcaaaggtcatctttttctggcttcttgtcctttatcttcttcaagttgctgtaatagtattattctgctccacttctagcccacacagcatacctctgacagaggtgattgggccgatatggctgatgctgctcctgggaactgtgcattgccagattgtttccacaagaacacccaaacctcntctaagtacag

SEQ ID NO: 36 - DNA, 589 bp, Homo sapiens
  misc_feature: Incyte ID No: LI:1008973.1:2000MAY01
cacatcccgaggaacagaagcgggcctgctcagcatgtctgcaaggaccggcgttccagaccaagatggcccgctgctccgaggacccagctcgctccaggctgtgactccacatcccgaggtcgccgcctggcgaccgggcagcgaggaccggccaccccagactgcctgtgccgccgccccgagctcggacagagccgcgaccgcgaggacagcgacgcctgcacagctctggcgagatggcggcagggtccactacgctgcgcgcagtggggaagctgcaggtgcgtctggccactaagacggagccgaaaaagctagagaaatatttgcagaaactctccgccttgcccatgaccgcagacatcctggcggagactggactcagaaagacggtgaagcgcctgcggaagcaccagcacgtgggcgactttgccagagacttagcggcccggtggaagaagctggtgctcgtggaccgaaacaccgggcctgacccgcaggaccctgaggagagcgcttcccgacagcgctacggggaggctcttcaggagcgggaaaagggctgggggcttcccagaaaacgcga

SEQ ID NO: 37 - DNA, 1315 bp, Homo sapiens
  misc_feature: Incyte ID No: LI:1190250.1:2000MAY01
tagggaatggctggggttggctgaagagcgcacagtggagttttaatgtccgccatgttgagccatggcgtattgaagagagcgagcgagagaggagcggagcggcacagcctcccaccctcccggctggtgttagtgcccggacggcgggctctgcgctccgcccctcaagtccccggcagcggttggcgagtggggaccgaacccccggttctccatgatcccgctggccggggccgtttcccccagagcggagaggtatctgctgcgcctgagatgagtaaactgtcgtttcgggcgcgggcgctagacgcctcgaagccgctgccggttttccgctgtgaggatctgcccgacctgcacgaatacgcctcgataaacagggccgtgccgcagatgcccaccggaatagagaaggaagaggagtcggaacatcatcttccagcgggcttatttcagcacagcaggtgtatggcgagaagagggatttatatggttataccggtcccagaggcagaaagtaattattgcttactatgaagtctataatatcctggggaatttaagatgccaaaagcagcttcatttcacatacagccttttagtttggatgctgaacagcctgattatgatttggatttctgaagatgaagatatttgtgaatataactgttaaaagaaaaatggaacacttctgcccccttgcccatttgtaggcaaatggattgacccccctagaaaaaggcagtggtcagcagccagtcagtctgcaggaagccaaactactgctaaaagaagatgatgaactaattagagaagtttatgaatattggattaaaaagagaaaaaactgtcgagggccatctcttattccatcagtaaaacaagagaagcgagatggttccagcacaaatgatccttatgtggcttttagaaggcgtactgaaaaaatgcagactcgaaaaaatcgcaaaaatgatgaagcctcttacgtaaatatgcttaagctgcgacgagatctaagtcgagctgttactattctagagatgataaaaagaagagataaaagtaaaaggagagctattgcacttaacactggaaattatggaaaagaggtataatttgggcgactacaatggagagatcatgtctgaggttatggcacagagacagccaatgaaacctacttatgccatccccatcatccctattactatatagcagtctatttaaacaccatggaagcatatggatgtgaaggagttcaaatgttaataagcaagattatagtccgatcttatccgaccgatacggt

SEQ ID NO: 38 - DNA, 1616 bp, Homo sapiens
  misc_feature: Incyte ID No: LG:021371.3:2000FEB18
gtgacagagccgtgcctggaacccaggtctcctgactgggaggtcccagctctcgccgttgctctaatccaggccaggtcctactgtgctgacagaatgtcggctgttgggcggtagtatccatgctgccctctaaccacaggctgtctgtgtcatgtgactcaatgcacccatcagtggtctgtgatgagtgggtgggaggatattttggctggcctctggcccacttgtccacgtctgtcctggtgtgtcagtggctggcttgtgacctggcatgtccgtggcaggtgtggaaggagagcctctagtgagttcccagagtggacagagccctccagagccacaggatcccgaggctcccagctcctcaggcccaggacacctggtggccatgggcaaggtgagcaggacccctgtggaagctggtgtgagccagtcagatgcagagaacgcagccccctcctgcccggatgagcatgacactctgccccggcgccgaggtcgaccttccaggcgcttcctaggcaagaaataccgcaagtactattacaagtcgcccaaaccacttttgaggcccttcctgtgccgcatctgtggttctcgctttctgtcccacgaggacctgcgcttccacgtcaactcccatgaggctggcgatccccagctcttcaagtgcctgcagtgcagctatcgttcccgccgctggtcctcgctcaaggagcacatgttcaaccacgtgggcagcaagccctacaagtgtgacgagtgcagctacaccagtgtctaccggaaggacgtcattcggcacgccgctgtgcacagccgggaccggaagaagaggccagatccgactccaaagctgagctctttcccctgccctgtgtgtggccgtgtgtaccccatgcagaaaagactcacgcagcacatgaagacgcacagcactgagaagccccacatgtgtgacaagtgtggaaagtcctttaagaagcgctacaccttcaaaatgcacctgctcacgcacatccaggctgttgccaaccgcaggttcaagtgtgagttctgtgagtttgtttgtgaagacaagaaggcactgctgaaccaccagttgtcccacgtcagtgacaagcccttcaaatgcagcttttgtccctaccgcaccttccgagaggacttcttgctgtcccatgtggctgtcaagcacacaggggccaagcccttcgcctgtgagtactgccacttcagcacacggcacaagaagaacctgcgcctgcacgtacggtgccgacacgcaagcagcttcgaggaatgggggaggcgccaccctgaggagcccccctcccgccgtcgccccttcttctctctgcagcagattgaggagctgaagcagcagcacagtgcggcccctggaccacctcccagttccccaggacctcctgagatacccccagaggcgacaactttccagtcatctgaggctccctcattgctctgttctgacaccctgggcggcgccaccatcatctaccagcaaggagctgaggagtcgacagcgatggccacgcagacagccttggatcttctgctgaacatgagtgctcagcgggaactggggggca

SEQ ID NO: 39 - DNA, 521 bp, Homo sapiens
  misc_feature: Incyte ID No: LG:475404.1:2000FEB18
ggcggttgctttgtctctccttcgccggagccggctcttcctgttagtctccgctgctagttcttggctctgggaggcccaggtggctctgcagcagcctctgccaccctgtgacctgcgagtattgggacatccctagctgacgccaggacacccgggaagccgaggaatggactcggtggcttttgaggatgtggctgtgaactttacccaggaggaatgggctttgctagattcttctcagaagaatctctacagagaagtgatgcaggaaacctgcaggaacctggcttctgtaggaagccaatggaaagaccagaatattgaagatcacttcgaaaaacctgggaaagatataagaaatcatatcgtacagagactgtgtgaaagtaaagaagatggtcagtatggagaagttgtcagccaaattccaaatcttgatctgaacgagaacatttctactggattaaaaccatgtgaatgcagtatttgtggaaaagtctttgtacgtcattccctcc

SEQ ID NO: 40 - DNA, 848 bp, Homo sapiens
  misc_feature: Incyte ID No: LG:979406.2:2000FEB18
  unsure 407, 509, 590, 645, 689, 707, 829: a, t, c, g, or other
aattcactgtctgtagcatctgctcctccacagagggaccctggaatggcgatggcactcccgatgcctggacctcaggaggcggttgtgttcgaggatgtggctgtgtacttcacaaggatagagtggagttgcctggcccccgaccagcaggcactctacagggacgtgatgctggagaactatgggaacctggcctcactaggctttcttgttgccaaaccagcactgatctccctattggagcaaggagaggagccgggggccttgattctgcaggtggctgaacagagcgtggccaaagccagcctgtgcacagaggaccctaatacactgcccagcagaagccaggaaggaagccctgccagctcagaaggtgggccaggagagaagggtgtggccggaanggtagccggtgggggtgctgcatcctcttggccccacggggagcaccctgtcacccctaacagatgaagagaaggtgaggggggattgagttacctgcccantggtgtgtcaaactccatgatgggggtgggaacatgcagacctggcccctccaaggcccactgctccccgggctgtgcgcnccacagtctgtgccaggggctgcagaaagagccatgggaagcctggccctggtanggcaccaagatggggagggctggatccaccctccagagaacaanaatcctgggcagtagccnggacatggtgggggaagctgaagggttgtccctgagcatccccaacatggagctcggaagtctgggccatgggcaggaaagcacgaaggtcagggccagcctggggaaccaagagctgtgcnacgatcccttccacctggg

SEQ ID NO: 41 - DNA, 1307 bp, Homo sapiens
  misc_feature: Incyte ID No: LG:410726.1:2000FEB18
tgctgttgcggatgctgatgcgtttctgcaggactgtaaactggattcctggaacctttgatattcctggctgtgtatagtgcctgttggtggactgtactgatactcaactagagtgtgaagggactggattcctgcccctgagacacaatgcaagctgtagtgcccttgaacaagatgacagccatctcaccagaacctcaaactctggcctcgactgaacaaaatgaggtcccaagagtggttacttctggggaacaagaagctattttaagaggaaatgctgctgatgcagagtctttcagacagaggtttaggtggttttgttactcagaagtagctggacccaggaaagctctgagtcaactctgggagctctgcaatcagtggctgagaccagacattcacacgaaagaacagattttagagcttctggtgtttgagcagttcctgaccattttgcctggggagatcaggatttgggtaaagtcacaacatcctgagagtagtgaggaagtggtgaccctaatagaagatttgacccagatgcttgaagaaaaagatccagtctctcaagattctactgtttcccaagaggagaactcaaaagaggataaaatggtcactgtttgtcccaatactgagtcctgtgaatctataacattgaaggatgtagctgtgaacttttcaagaggagagtggaagaagctggagccttttcaaaaggagctatataaggaagtgctactggaaaacctcaggaacctagaatttctggactttccagtttcaaaattagagttgatttcccagctaaagtgggttgaattgccatggctgctggaagaagtctcaaaaagctcccgactagatgaatcagctttagataaaataatagaaaggtgcctcagggatgatgatcatggcttgatggaagaatcccagcaatattgtggcagctcagaggaggatcacggtaatcagggaaattcaaaaggaagagtcgcacaatacaaaactcttgggagtggcagtaggggtaagaaatttgacccagattaaagcccctttggacatgatttcaaagaaacttcagacgtaattaaacatctgagagtctacttgaggaagaaatctcggaggtataatgaaagcaagaaacccttcagttttcattcagaccttgttctgaccagcaaggagaaaaccgccggagataagtcacggaaatctaatgatggtgggaaagtcctgagtcactcttcagctcgtactgaacatcagaaacgtcagaagattcatttttg

SEQ ID NO: 42 - DNA, 2456 bp, Homo sapiens
  misc_feature: Incyte ID No: LG:200005.1:2000FEB18
ggagcctggtcaacaagccagcaccactgtgctaggaggccaggccggctctgcagccgacgcatcccgtgtgagcagacacacatagctcgctttcttgggggctctttgtcagccaccaacacagagagcacacactgacacacacgtacacaaagatctgagccaggttgtgggagggtatgttctgtcttgtgctttttcttttagaagctactaaagggtgttggggatgcttctgactattatgaaggccaaaaggcctgttgactggggctgcttttaaccctttcctatttgctgagaatgcagccgtgtgacagtaactg[450 bp omitted]cgatctccagtgctgaagagtttgatgacgacgagaagattgaggtggatgacccccctgacaaggaggacatgcgatcaagcttcaggtcgaatgtgttgacggggtcggctccccagcaggactacgataagctgaaggcactcggaggggaaaactccagcaaaactggactctctacgtcaggcaatgtggagaaaaacaaagctgttaagagagaaacagaagccagttctataaacctgagtgtttatgaaccttttaaagtcagaaaagcagaggataaattgaaggaaagctctgacaaggtgctggaaaacagagtcctagatgggaagctgagctccgagaagaatgacaccagcctccccagcgttgcgccatcaaagacaaagtcgtcctccaagctctcgtcctgcatcgctgccatcgcggctctcagcgctaaaaaggcggcttcagactcctgcaaagaaccagtggccaattcgagggaatcctccccgttaccaaaagaagtaaatgacagtccgagagccgctgacaagtctcctgaatcccagaatctcatcgacgggaccaaaaaaccatccctgaagcaaccggatagtcccagaagcatctcaagtgagaacagcagcaaaggatccccgtcctctcccgcagggtccacaccagcaatccccaaagtccgcataaaaaccattaagacatcttctggggaaatcaagagaacagtgaccagggtattgccagaagtggatcttgactctggaaagaaaccttccgagcagacagcgtccgtgatggcctctgtgacatcccttctgtcgtctccagcatcagccgccgtcctttcctctccccccagggcgcctctccagtctgcggtcgtgaccaatgcagtttcccctgcagagctcacccccaaacaggtcacaatcaagcctgtggctactgctttcctcccagtgtctgctgtgaagacggcaggatcccaagtcattaatttgaagctcgctaacaacaccacggtgaaagccacggtcatatctgctgcctctgtccagagtgccagcagcgccatcattaaagctgccaacgccatccagcagcaaactgtcgtggtgccggcatccagcctggccaatgccaaactcgtgccaaagactgtgcaccttgccaaccttaaccttttgcctcagggtgcccaggccacctctgaactccgccaagtgctaaccaaacctcagcaacaaataaagcaggcaataatcaatgcagcagcctcgcaaccccccaaaaaggtgtctcgagtccaggtggtgtcgtccttgcagagttctgtggtggaagctttcaacaaggtgctgagcagtgtcaatccagtccctgtttacatcccaaacctcagtcctcccgccaatgcagggatcacgttaccgacgcgtgggtacaagtgcttggagtgtggggactcctttgcacttgaaaagagtctgacccagcactacgacagacggagcgtgcgcatcgaagtaacgtgcaaccattgtacaaagaacctcgttttttacaacaaatgcagcctcctttcccatgcccgtgggcataaggagaaaggggtggtaatgcaatgctcccacttaattttaagccagtcccagcagatcaaat

SEQ ID NO: 43 - DNA, 738 bp, Homo sapiens
  misc_feature: Incyte ID No: LG:1076828.1:2000FEB18
  unsure 74, 161, 279, 339, 346, 362: a, t, c, g, or other
actcctaagcctcaagtgatctccttattggaacaagggaaagagccctggatggttggcagagagcttacaanaggcctgtgttcagatctggaatcgatgtgtgaaaccaagttattatctctaaagaaggaagtttatgaaatagaattatgccaganggagataatgggacttacaaagcatggccttgagtactccagttttggagatgttttggaatatagaagccaccttgcaaaacaactgggatatccaaatgggcattttagtcaaganatattcactcctgaatacatgcccacatttattcaacagacattccttactctccatcanataattnataatgaagacagacnctatgaatgtaaggaatgtggaaagatgtttagtcatggctcacaacttactcaacatcagagaatacacactggtgagaaaccctatcaatgtaaggaatgtggaaaagcgtttaatcgtggctcactccttacacgacaccagaggattcatactggtgagaaaccctatgaatgtaaagaatgtggaaaaacctttagtcgtggctcagaacttactcaacatgagcgaattcacacagctggagctccgttactctcatggggactttgagaatggtatctgggtgttatggatcatggagcagaaatacagaaggagtctgcaaccctgatgactttgtggaacagccatactagctctggtctgcttgcc

SEQ ID NO: 44 - DNA, 310 bp, Homo sapiens
  misc_feature: Incyte ID No: LG:1076931.1:2000FEB18
gggcggtgaaggtcagagtgcagacctgagaccactgctcaccgacttcagactccagtttatctgtgccccagcttcctcacttagtctcagaagacttaggctgaggcctcagaaggagatctccatcctttgtccagagcagaacaggatggccatgtcccaggaatcattgaccttcaaggacgtgtttgtgggcttcaccctggaggagtggcagcaactggaccctagtcagagggctctgtatagagatgtgatgctggagaactacagcaaccttgtctcagtggggtattgtgctcacaaa

SEQ ID NO: 45 - DNA, 404 bp, Homo sapiens
  misc_feature: Incyte ID No: LG:1078121.1:2000FEB18
tgctcggggaagctcaggtggccgccacagcctcttgccctctgacctgcaggtatcaggagatccatagctaagcagcctggacacccgggaagctgggaaatggtgtgatttgtccagataatctcacctgagaaggaatcccagagaagaaggaagaagaggaagaaatggctggttctcagggactgttgatattcagggatgtggccatagaattctctccggaggagtggagctatctggaccctgctcagcagaatctgtatagggacgtgatgttagaaaactacagaaacctggtctccctgggtattgctgtctctaagccagaactgatcacctgtctagagcaaaggaatgagccctggaatgtgaagaaacattgagacagtagccagaca

SEQ ID NO: 46 - DNA, 1179 bp, Homo sapiens
  misc_feature: Incyte ID No: LG:1079203.1:2000FEB18
gggagctctaggtctagtctttactgctctgtgtattctgctcctagaggcccagcctctgtgactccgttatctggcaggtattgggagatgcacagctaagatgccaggaccacctggaagcctagaaatgttatatattctcatttcactgaagacctttggccagagcatagcataaaagattcttttcaaaaagtgatactgagaggatatggaaaatgtggacatgagaatttacaattaagaataagttgtaaaagtgtggatgagtctaaggtgttcaaagaaggttataatgaacttaaccaatgtttgagaactacccagagcaaaatatttcaatgtgataaatacgtgaaagtctttcataaattttcaaattcaaacagtcataagaaaagaaatactggaaagaaggttttcaaatgtaaagaatgtggcaaatcattttgcatgctttcacatctaacacaacatataagaattcacactagagagaattcttacaaatgtaaagaatgtggcaaagttcttaaccaatcctcagagcttattaaacataagaaaattcatactggagagaaaccctacacgtgtgaaaaatgtggcaaaacctttaaccagtctgcaaatctttatgcacataagaaaattcatactggagataaaaccatacaagtgtaaagaatgtggcaaagcctttaagtcatactacagcattcttaaacataagagaactcataccaggggaatgtcttacgaaggtgacgaatgtcgcggtctttaaatgctcctcaatcctttctaatcataagataattcataatgaagagaaactctaaaatgtgaaaaatgtgagaaggcttttaatcacacctcaatctgttgtagacataagagtaattatattgatgagaagccaaattaaaattaaaaatgtggcaaagacttccaattctagtcagttcttaatgtaattcctactgaagaaaacacctggaaatacaaaaaatgtggcaaaacttgtaaccaatgcttagcatttttgcacatgatagtatttatatgtgagactacttgtacaaacataaaaatatacaaaagctattgtctacttgaaatttatagttaataaaagcaaataaatgtatttctgttgaaagacctttagaaata

SEQ ID NO: 47 - DNA, 557 bp, Homo sapiens
  misc_feature: Incyte ID No: LG:1082586.1:2000FEB18
  unsure 42: a, t, c, g, or other
gaaaggaaaaagattgaagaaaagtaagcacagcctaggagncccatgggacaatatcaagcagaccaatatatacatcgtaggagttccagcagaagagagaaaggggcagagagaatattggaagaaataatggctgaaaacttttcaagtttgataaaagacatgaatataaacatccaagaagctcaacaaactccaagtatgatgaactcaaagatagccacattgagacatattataatcaaactgtcaaaagacaaacacaggcctttgtctctcactgcagccagagctcccagtcttgtgtttacttctctgtttcttctgcttctagaggcccagcctctgtggccctgtgacctgcaggtattgggagatccactgctaagatgccaggaccccctggaagcctagaaatgagatcattgacatttagggaggtggccatagaattatctctggaggaatggcaatgcctggacactgcacagcagaatttatataggaatgtgatgttagggaactacagaaacctggtcttcctgggtatattg

SEQ ID NO: 48 - DNA, 353 bp, Homo sapiens
  misc_feature: Incyte ID No: LG:1082774.1:2000FEB18
cagagatccgagctatcgatcttaactgctctgtgccgtcagctcctagaggcccagcctctgtggccctgtgacctgcaggtattaggagggtcacagctaggacgccgggaccccctggaagcctagaaatgggaccattgcaatttagagatgtggccatagaattctctctggaggagtggcattgcctggacgctgcacagcggaatctatatagggatgtgatgttagagaactacagaaacctgatcttccttggtattgttgtctctaaaccaaacctgatcacctgtctggagcaaggaaaaaaacctttaactatgaagaggcatgagatgattgccaaaccc

SEQ ID NO: 49 - DNA, 1027 bp, Homo sapiens
  misc_feature: Incyte ID No: LG:1082775.1:2000FEB18
ctctgctctgccaacactagtggaatatgatcacatcccagggatcagtgtcatttagggatgtgactatgggcttcactcaagaggagtggcatcatctggaccctgctcagaggaccctgtagaggaatgtgatgctggagaactacagccaccttgtctcagtagggtattgcattcctaaaccagaagtgatcctcaaattggagacaggcaaggagccatggatattagaggaaaaatttcgaagccagagtcatctgggtgagttagtgccagatggaatttaaagaattaattaataccagtagaaactattcaagaatgaagttcaatgagtttaacaaaggtggaaaatgtttctgtgatgaaagcatgaaataattcattttgaagaggaaccttctgaatataataacaatgggaacagcttctggctgaatgaagacctcatttggcatcagaagattaaaaattgggagcaaccttttgaatacaatgaatgtgggaaagctttccctgagaattcactcttccttgtacataagagagcttacacaggacagaaaacatgcaaatatactgaacatgggaaaacctgttatatgtcattttttattactcatcagcaaacacatccaagagagaaccactatgaatgtaatgaatgtggagaaagtatctttgaggaatccattctctttgaacatcagaatgtttacccattcagccagaatttaaatcccactctaattcagagaacccactcaattagcaatattattgaatataatgaatgtggaacctttttcagtgaaaaattagcccttcatttacaacagagaacacatccaggggaaaaaccttatgaatgtcatgaatgtggaaaaaccttcacccagaagtcagcccacacaagacatcagagaacacacacagggaaaaccctatgaatgtcacggatgtgggaagaccttgtataagaattcagacctcattagaaatcaaagaattcacacagggagtt

SEQ ID NO: 50 - DNA, 364 bp, Homo sapiens
  misc_feature: Incyte ID No: LG:1083120.1:2000FEB18
cgccaggcctacgagatttgacttgtaaagaattacttatattgactgagagagaagcccagaagaggaagaagaggaaagaaaaggagtcagggatggctcttacacagggacctttgacattcagggatgtagccatagaattctctcaggaggagtggaaatccctggaccctgtgcagaaagctttgtactgggatgtgatgttggagaactacaggaacctggtcttcctgggtaaggataattttgctctagaagttaagatctgccctcgtgtatttttgtattttctctgttgtctttctgtgggagcccgttccattcatttgcactgagactgaagccttgttgagacacaaat

SEQ ID NO: 51 - DNA, 901 bp, Homo sapiens
  misc_feature: Incyte ID No: LG:1087707.1:2000FEB18
cctagcttctaggctctgagtccagtacccgtctgtactattccatctcttccgctccattagctcctcggtgactccaccatagcccctgttatcctgtgacctgcaggtactgggacatccatagggaagaaggcggaacatccggaggctgggaaatgcgagtgctaacattcagggatgtggctgtagaattctccccagaagagtgggaatgcctggactctgctcagcagcgtttgtatagggatgtgatgttagagaactacggaaacctgttctccttgggtcttgctatctttaagccagacttgattacctatctggagcaaagaaaagagccttggaatgcaaggagacagaagacagtagccaaacacccagattattatgatgtttgtaatgaagattatgagtataattggagctatatgtttctgaattctgaacaactatttataaaattttatcctacttttttctgttgaacatatgacttctctcgtctgctaaacacatacagacctttagttttggtttacatggatttaaatatatagatatatcactgtaaaataaacttcaggtgtaacagatttatagagaaagtaatcatatttgtttatggttgtgtacctactttgagaagaaaagaaaaatattagaatgaacagataattttacaagtgttgatcacttaccagcaaaccagaaacttcagagattttgaaagcaaatctattttctctgctgtgtattaaattcatttatctaaaatgttattgctcctggcttagaatcatcttgtgcaaattctctttttttgttgtttgtctgtttgcctgttgctcaccatagacataattttcttttcataaaacattctttgtataatcacctc

SEQ ID NO: 52 - DNA, 254 bp, Homo sapiens
  misc_feature: Incyte ID No: LG:1090915.1:2000FEB18
ttccgttttcgcgtggttcttttgcaagctctggattctctggagtttgaatgtttccagtattggaaccccaccaagtaggactgatcaggtcttacaattctaaaaccatgacctgttttcaggaattagtgacattcagggatgtggccatagacttctctcggcaggagtgggaatgcctggaccctaatcagagggacttatacagggatgtgatgttggagaactacaggaacctggtctccctggga

SEQ ID NO: 53 - DNA, 597 bp, Homo sapiens
  misc_feature: Incyte ID No: LG:1094230.1:2000FEB18
tgcagtcagagctccaggtctggttcttctcctaaaggcccaggctgtgtggccccgtgtcctgcaggtattgggagatccacagctaagacaccgggacctcctggaagccaaaaatgggaccattgcaatttagagatgtggccatagaattctctctggaggagtggcattgcctggacactgcacagcggaatttatataggaatgtgatgttagagaactacagtaacctggtcttccttggtattactgtttctaagccagacctgatcacctgtctggagcaaggaagaaaacctttgaccatgaagagaaatgagatgatagccaaaccctcagtgagcttccttcaagttcacagtgagagccaaagtcctcttcatgacatataagagactgcacagtgtggctgcttttccataatttttgggacgcacaaatgtctgcatgattttgagaaactaaaattactctcaaagttctctttttgcatcagatctgaaatgtctgagagtaatagtttctgttgaatttttttttgttcatttttctgcacagtccattctgtttttattactatctaggcttgaaata

SEQ ID NO: 54 - DNA, 637 bp, Homo sapiens
  misc_feature: Incyte ID No: LG:474848.3:2000FEB18
ggaagtgcggcacccagaggcggtcttgtagctgggccagcctggggcttggttctatgtccctgcgggtcggtgcgagggcgaagaggaacccgtgggcccgggggatcccggggggccggaccagtgttccccagttgtgggagcagacgcgtgggcgcatcgcgggcgggcagggcctgaagtgcagctatgtttccagtgttctctggctgtttccaagagctacaagaaaagaataaatctctggagttggtgtcctttgaggaggtagctgtgcacttcacctgggaggagtggcaggacctggatgacgctcagaggaccctgtacagggacgtgatgctggagacctacagcagcctggtatcattggggcattgcattaccaaacctgagatgatcttcaagctagagcaaggagcagagccatggatagtagaagaaaccctaaacctgagactttcaggctaagcctccctccttttggtagaggcttttttataccatttgggaactggtttggataagctaccttaatgaaggacgacacatccctccagagatgataaaagactttttgtcttttctgatttaagaaaactttatctcgtaagctacctatagtttacaaaaa

SEQ ID NO: 55 - DNA, 754 bp, Homo sapiens
  misc_feature: Incyte ID No: LI:251656.1:2000FEB01
  unsure 702: a, t, c, g, or other
tgaaaatggggagaactgtaatcaagacatgtttgagaatgaatcacgtaagatattctcggaaatgcctgaaggtgaaagtgctcagcactccgatggggaaagtgactttgagagagatgctggcatccagaggctccagggacacaccccaggtgaggaccacggggaggtggtttctcaggacagggaagttggccagctcataggcctgcagggcacctacctaggggagaagccctacgaatgtccccagtgtgggaagaccttcagccggaaatcccacctcatcacacacgagaggacccacacaggagagaaatactacaaatgtgatgaatgtggaaaaagctttagtgatggttcaaattttagtagacaccaaaccactcacaccggggagaagccctacaaatgcagagactgtgggaagagctttagccggagtgccaacctcataacccaccagaggatccacacgggggaaaagcccttccagtgtgccgagtgtggcaagagcttcagcaggagtcccaacctcattgcacatcagcgcacccacacaggagagaaaccctactcgtgccccgagtgtggaaagagctttggcaaccgatccagccttaacacgcatcaggggatccacactggagaaaagccctacgaatgtaaagaatgcggcgaaagttttagttacaactncaatctaatcagacaacagagaattcacacaggagagaaaccctacaaatgt

SEQ ID NO: 56 - DNA, 1601 bp, Homo sapiens
  misc_feature: Incyte ID No: LI:021371.1:2000FEB01
acgtctgtcctggtgtgtcagtggctggcttgtgacctggcatgtccgtggcaggtgtggaaggagagcctctagtgagttcccagagtggacagagccctccagagccacaggatcccgaggctcccagctcctcaggcccaggacacctggtggccatgggcaaggtgagcaggacccctgtggaagctggtgtgagccagtcagatgcagagaacgcagccccctcctgcccggatgagcatgacactctgccccggcgccgaggtcgaccttccaggcgcttcctaggcaagaaataccgcaagtactattacaagtcgcccaaaccacttttgaggcccttcctgtgccgcatctgtggttctcgctttctgtcccacgaggacctgcgcttccacgtcaactcccatgaggctggcgatccccagctcttcaagtgcctgcagtgcagctatcgttcccgccgctggtcctcgctcaaggagcacatgttcaaccacgtgggcagcaagccctacaagtgtgacgagtgcagctacaccagtgtctaccggaaggacgtcattcggcacgccgctgtgcacagccgggaccggaagaagaggccagatccgactccaaagctgagctctttcccctgccctgtgtgtggccgtgtgtaccccatgcagaaaagactcacgcagcacatgaagacgcacagcactgagaagccccacatgtgtgacaagtgtggaaagtcctttaagaagcgctacaccttcaaaatgcacctgctcacgcacatccaggctgttgccaaccgcaggttcaagtgtgagttctgtgagtttgtttgtgaagacaagaaggcactgctgaaccaccagttgtcccacgtcagtgacaagcccttcaaatgcagcttttgtccctaccgcaccttccgagaggacttcttgctgtcccatgtggctgtcaagcacacaggggccaagcccttcgcctgtgagtactgccacttcagcacacggcacaagaagaacctgcgcctgcacgtacggtgccgacacgcaagcagcttcgaggaatgggggaggcgccaccctgaggagcccccctcccgccgtcgccccttcttctctctgcagcagattgaggagctgaagcagcagcacagtgcggcccctggaccacctcccagttccccaggacctcctgagatacccccagaggcgacaactttccagtcatctgaggctccctcattgctctgttctgacaccctgggcggcgccaccatcatctaccagcaaggagctgaggagtcgacagcgatggccacgcagacagccttggatcttctgctgaacatgagtgctcagcggggaccggggggcacagccctgcaggtgtgctgcctgggaacctgctccccttcccagctaccgcagtacccagccctgcactggacactgggactagaggaaaacagtgtatcagagcttctccgcccttgggggctcccaggcagtggaggagacagatctgctgaagtctggtgggcaaacagagaggaacaggctttgccacggaggccgcagggtatcccatccatt

SEQ ID NO: 57 - DNA, 1059 bp, Homo sapiens
  misc_feature: Incyte ID No: LI:133095.1:2000FEB01
  unsure 107: a, t, c, g, or other
tggactgggcgaggaggtgccctgtgccatgatggagggtgtggcagcctacacccagacagagcccgagggtagccagcctagcaccatggacgccaccgcagtancaggcatcgagaccaagaaagagaaggaggacctgtgcttgctaaagaaggaggagaaggaggagccagtagccccggagctggcaacaacggtgcctgagagcgcagagcctgaggcagaggcggacggggaggagctggacggcagcgacatgtcagccatcatctatgaaatccccaaggagcctgagaagaggcggcggagcaagcggtcgcgggtgatggatgctgacggcctgctcgagatgttccactgcccatacgagggctgcagccaagtctacgtggccctcagcagcttccagaaccacgtcaatcttgtgcatcggaaaggaaagaccaaagtgtgccctcatcctggctgtggcaagaagttctatttatccaaccacctgcggcggcacatgatcatccattcaggtgtccgtgaattcacctgcgagacctgcggcaagtccttcaagaggaagaaccacctggaggtacatcggcgcacccacaccggcgagacccccctgcagtgcgagatctgtggctaccagtgccggcagcgcgcgtcgctcaactggcacatgaagaagcacactgcggaggtgcagtacaacttcacgtgcgatcgctgcgggaagcgcttcgagaagctggacagcgtcaagttccacacgctcaaaagccacccggatcacaagcccacctgacccacctgaccactgaccgcccctatttattcgtccgctcggacaccacgcccgggcttgccggggcctggacagctgcgagggccgcccggaccgcgggccggaaggaggcgcccccgccccgccccagagctgggccccctgggcaggttccccaccccgccccaccgcatccttctcggagctggtgcctggggctgcattgctggaactgtgtcaagagagcagagtgagattaaagagcgagaaaggag

SEQ ID NO: 58 - DNA, 1187 bp, Homo sapiens
  misc_feature: Incyte ID No: LI:236654.2:2000FEB01
gcggccgctgcctgcagaccttcccgttggaggccatcactgccttcatggaccacaagaagctgggctgtcagctcttcagaggccccagccgcggccagggctcagaacgagaggagctgaaggccttgagctgcctgcgctgtggcaaacagttcacagtggcctggaagctgctgcgtcacgcccagtgggaccacggactgtccatctaccagacagaatcagaggccccggaggccccgtcctgggcctggccgaggtggctgcagccgtgtcggcagtggtggggccagcagctgaggccaagagcccccgtgcaagtggcagcggcctcacccggcggagcccacctgtcctgtgtgcaagaagaccctcagctccttcagcaacctcaaagtgcacatgcgctcacacacaggcgagcggccctatgcttgcgaccagtgtccctacgcctgcgcccagagcagcaagctcaaccgccacaagaagacccaccggcaggtgccgccccagagccccctcatggccgacaccagccaggagcaggcctctgcagcccctccggagccggctgtccatgctgctgcccccaccagcacccttccatgcagcggtggtgagggggctggagccgccgccacagcaggtgtccaggaacccggggctcctggcagtggggctcaagccggccctggtggagacacttggggagccatcaccacggaacaaagaactgaccctgcaaacagccagaaggcatcacccaaaaagatgcccaagtcagggggcaagagccgcgggcccgggggcagctgtgagttctgcgggaagcattttaccaacagcagcaacctgacggtgcaccggcgctcacacaccggggagcgcccctacacctgtgagttctgcaactacgcctgcgcccagagcagtaagctcaaccgccaccgccgcatgcacggcatgacgcctggcagcacccgcttcgagtgcccccactgccatgtgcccttcggcctgcgagccaccctggacaaacacctgcggcagaagcaccctgaggcggccggcgaggcctgagcccaggaaagcccccctcactgtccctggtaccgctgccaacacccattgacctcctcgtttttgcccgccttctccaagtaaattttcccttttattta

SEQ ID NO: 59 - DNA, 1671 bp, Homo sapiens
  misc_feature: Incyte ID No: LI:200009.1:2000FEB01
  unsure 1663: a, t, c, g, or other
gcggccgccgcgcccccgccggagctgccggagtggctgcgggacctgcctcgcgaggtgtgcctctgcaccagtactgtgcccggcctggcctacggcatctgcgcggcgcagaggatccagcaaggcacctggattggacctttccaaggcgtgcttctgcccccagagaaggtgcaggcaggcgccgtgaggaacacgcagcatctctgggagtaaatgtcccttcaacggtaatggaagccatgttgccgaccagaagcccttgaggcctttcaccaaaggcggcaaatctcgcccctaccacccagcagcgctccgttgttttcccccagactccgtgcagcaggaacttctctcttctggataagtctgggcccattgaatcaggatttaatcaaatcaacgtgaaaaaccagcgagtcctggcaagcccaacttccacaagccagctccactcggagttcagtgactggcatctttggaaatgtgggcagtgctttaagactttcacccagcggatcctcttacagatgcacgtgtgcacgcagaaccccgacagaccctaccaatgcggccactgctcccagtccttttcccagccttcagaactgaggaaccacgtggtcactcactctagtgaccggcctttcaagtgcggctactgtggtcgtgcctttgccggggccaccaccctcaacaaccacatccgaacccacactggagaaaagcccttcaagtgcgagaggtgtgagaggagcttcacgcaggccacccagctgagccgacaccagcggatgcccaatgagtgcaagccaataactgagagcccagaatcaatcgaagtggattaacggattgatggttggaattaaactgcaaggaaagtcatgattaaatgtcacggacacttaagcaaaaccaaagatttcctctgagcaactttcaatcagtcccagaaaaccaaaagcagtaataaaataagtaagatgttaagagatattgatcctggcatggaagtcagaccaggaaagagattatttatttatgacttagggatgagacttatttcagtggacaactaacctgggatggttaacatttccagtcccaccatgtattttgctttgtttctaaaaagctttttaaaaactgttatttaataccaaagggaggaatcgtatgggttcttctgcccaccgttgtgactaagaatgcacagggacttggttctcgttgcacctttttttagtaacatgtttcatggggacccactgtacagcccttcattctgctgtgtcagtttggcctggcctgacactggctgccccagcggggaccacggaagcagagtgagagccttcgctgagtcaatgctaccttcagccccagacgcatcccatttccatgtcttccatgctcactgctcatgcactttttacacggtttcttccaaacagcccggtcttgatgcaggagagtctggaaaaggaagaaaatggtttcagtttcaaaattcaaaggaaaaagttgaggacttattttgtcctgtcaagattgcaagaacatgtaaaatgtacggagcttcataatacgttatattgttccgaagcagctcgttgagaaacatttgttttcaataacattttagcttaaaaaaaanaaaggaaa

SEQ ID NO: 60 - DNA, 952 bp, Homo sapiens
  misc_feature: Incyte ID No: LI:758502.1:2000FEB01
caacactcatcaaacatcagagaacccacacaggggagagaccctatgagtgcccagagtgtggaaagacttttgggcggaagccacacctcataatgcaccaaagaacccacacaggcgagaagccctacgcgtgcctggaatgtcacaaaagcttcagtcgaagctcaaatttcatcactcaccagaggacccacacaggggtgaagccttacaggtgtaatgactgtggggagagttttagccagagctcggatttgattaagcaccaacgaacccacacgggagaacggcccttcaaatgcccggagtgcgggaagggcttcagagatagttctcattttgtagctcacatgagcactcattcaggagagaggcctttcagttgtcctgactgccacaaaagcttcagtcagagctcacatttggtcacgcaccaaagaacacacacaggtgagagaccttttaagtgcgaaaactgtgggaaaggattcgccgacagctccgccctcactaagcaccaacgaatccacaccggagaaagaccctacaaatgtggagagtgtgggaagagcttcaatcagagctcccactttattacccatcagcgaatccacttaggagacaggccctatcgatgtcctgagtgtggcaagaccttcaatcagcgttcccatttcctcacacaccagagaacgcatacaggagaaaaacctttccactgtagtaaatgtaacaagagcttccgtcagaaagcgcatcttttatgccatcaagacacccatttgatttaggaagtagtctttggtgttcagctgctcccttgcacattttcattgctactgtcttcaagcaccccaaatagagaaaacctgggcgtcagtggctcaatttgggccctgatctattctccctctttcttgtctatgttataacagagaggatagactta

SEQ ID NO: 61 - DNA, 749 bp, Homo sapiens
  misc_feature: Incyte ID No: LI:344772.1:2000FEB01
  unsure 713: a, t, c, g, or other
cgcaaaaggctgtccctcccaaacctgggattctgggctcactgagttcacctgcgagtcagccctacctgcactgctctggtctagtacaaacaggctgctggcattgagagactggccattcctaggatgacctgggaatttatcccctctgcactgctccccaagcacttggataatgaagctgagctgtcttcaactgtattatatgtagacagaaggtcaccatctacagcctggtgaaaaatgagtcagacctttccactgtaaagacaaacacatgagctgagctaagaatctctttaaaatggacatagaagactgcaatggccgctcctatgtgtctggtagcggggactcatctctggagaaggagttcctcggggccccagtggggccctcggtgagcacccccaacagccagcactcttctcctagccgctcactcagtgccaactccatcaaggtggagatgtacagcgatgaggagtcaagcagactgctggggccagatgagcggctcctggaaaaggacgacagcgtgattgtggaagattcattgtctgagcccctgggctactgtgatgggagtgggccagagcctcactcccctgggggcatccggctgcccaatggcaagctcaagtgtgacgtctgcggcatggtctgtattggacccaacgtgctcatggtgcacaagcgcagtcacactnggtgaaaggcccttccattgcaaccagtgtggtgcc

SEQ ID NO: 62 - DNA, 620 bp, Homo sapiens
  misc_feature: Incyte ID No: LI:789445.1:2000FEB01
ggaacatcgagaagccaaggctagtggctgggttactgatggattactgatggattcttctcagcacttagtgacctttgaggatgtggctgtggactttacccaggaggagtggactttgttggatcaagcccagagagatctctacagagatgtgatgttggagaactacaagaatctcattatactagcagggtctgaattattcaaacgtagtctcatgtctggattggaacaaatggaagagctgaggacaggagtgacaggagttctgcaggaattggatttgcaactcaaaaccaaaggctccccactgctgcaagatatttctgcagaaagatcaccaaatggagtacaattggagagaagcaatactgcagagaaactgtatgactctaaccattctggaaaagtcttcaatgaacacccatttcttatgactcacatgataactcacattggagagaaaacttctgaggataatcagagtggataagccttaagaaagaactttcctcatagtttttacaagaaaagtcatgctgagggaaaaatgcctaagtgtgttaaacatgaaaaagccttcaaccagtttccaaatcttactaggcagaataaaa

SEQ ID NO: 63 - DNA, 1110 bp, Homo sapiens
  misc_feature: Incyte ID No: LI:789657.1:2000FEB01
  unsure 449, 530: a, t, c, g, or other
ttagcagtgtaatgaacgtggcaaaggttttaaatcaaaaagcaaagcttgcacatcagcatagaattcatactggagataaacgttacaaatgtgaagcatgtgacaaagtttacagtcgcaaatcaagcctcgaaagacaggagaattcatactggagagaaagcttacatatgtgaagaatgtcaccaagttttcagtcacactcaaaccttgaaagacacagcagaattcctactggagagatagcataaaaatgtaagagtttgtgacaaggctttcaggcataattcgcacctggcacaacatcctagaattcacattggagagaaagcttacaagtataatgaatgtgacaggtctttagtgggcagtcaacacttgtttaccatcaggcaatccatggtgtagggaaactttacttatgtaatgattgtcacaaagtcttnagttacactacaaccattgcgaatcattggagaatccataatgaataaagatctaacaagtgtaatgaatgtggcaagtcnttagtaaaagttcccaccttgcagttcatcagagaattcatactggagagaaaccttacaaatgtaatcgatgtggcaagtgcttcagtcaaagttcctctcttgcaaggcatcagacagttcatacaggagagaaaccttacatatgtgctgaatgtggaaaggccttttctcagaagtcagaccttgttgtacatcagataattcatactggagagaaacctgatcgatgtactgtatgtgggaaggccttcatccagaagtcccaactcactgtacatcagagaattcatacactaatgaaatcataagaatggtctgaacacagaaaagccttcagggtcagttcaagccttaatagatagtgcaacaaccaatggatttgatgattttggggactacatctttgttgataaaattttacaagtgaagtcatgttcctaatgtatttcattctttatcaaagataatagagaagtcaatacgtaaatgatggacattttcactatggcatataaaagtttttaaattgagaaatgaatgattagcataacagaacgaattgcatgtacatctcttt

SEQ ID NO: 64 - DNA, 899 bp, Homo sapiens
  misc_feature: Incyte ID No: LI:789808.1:2000FEB01
gaaatcaagaattcacacaggggagagcctttacagatgtcatgaatggagaaatccttcagtgaaaagtcatcccttactcaaaatcagagaacacacgtggggagaaatcatgaatgtcatgaatgtgggaaaacctcgtttaagtcagttctaactgtgcatcagaaaacacacaggggagaagccctatgaatgctatgcatgtggcaacacctttctcagaaaatccgacctcattaaacatcagagaattcacacaggagaaaaaccttatgaatgtaatgaatgtgggaagtcattctccgagaagtcaacccttactaaacatctaagaacacacagatgggaaatcttatgcatgtattcaatgtggaaaatttttctgctgctactacagtttcacagaacatctgagaagacacacaggggagaaaccttttggatgtaatgaatgtgggaaaaccttccatcagaagttggccctaattgttcaccagagaactcatataagacagaaaccctatggatgtaatgaatgtggaaaatcattctgtgtgaagtcaaaactcattgcacatcatagaacatacacaggggagaaaccctatgaatgtaatgtttgtggaaaattattattaagtcaaaactaactgtacatcacagaacacacttgaggtgaaaccctataaatgtagtaagtgagggaaattactctgggtgaagtcagaactttgtagagcagagaacataaagggtgagagaaatctgttaatataatgataatgagaacacctttgccctgaagtcagttctcacagtagagaagagaacttaaagagggaaaaaacaatatgaagatatggaatgcaggaaaacattattctgggatttgggcc

SEQ ID NO: 65 - DNA, 476 bp, Homo sapiens
  misc_feature: Incyte ID No: LI:792919.1:2000FEB01
catcagatgattcatatgggacagaacccatataattgtaaagaatgtgggaagagcttcaaatggtcctcatatcttttggtccatcaacgagtccacactggagaaaagccatacaaatgtgaggagtgtgggaagggctacattagtaagtcaggtcttgacttccaccatagaacccacacgggagagagatcttataactgtgataactgcgggaagagctttagacatgcttctagtattttgaatcataagaaactccactgccaaagaaagccattgaaatgtgaagactgtggaaagaggcttgtatgccggtcatactgtaaagaccaacaaagagaccacagtggagaaaacccatccaaatgtgaggactgtgggaagcgctacaagaggcgcttgaatctggatataattttatcattatttttaaatgacatataagttatacatatttatggagtgtgaaa

SEQ ID NO: 66 - DNA, 597 bp, Homo sapiens
  misc_feature: Incyte ID No: LI:793949.1:2000FEB01
tgcagtcagagctccaggtctggttcttctcctaaaggcccaggctgtgtggccccgtgtcctgcaggtattgggagatccacagctaagacaccgggacctcctggaagccaaaaatgggaccattgcaatttagagatgtggccatagacttctcccaggaggagtggcattgcctggacactgctcaaagagatttgtacagatgtgtaatgttggagaactacagcaacctggtcttccttggtattactgtttctaaaccagatgtgatttcctcattggagcaaggaagaaaacctttgaccatgaagagaaatgagatgatagccaaaccctcagtgagcttccttcaagttcacagtgagagccaaagtcctcttcatgacatataagagactgcacagtgtggctgcttttccataatttttgggacgcacaaatgtctgcatgattttgagaaactaaaattactctcaaagttctctttttgcatcagatctgaaatgtctgagagtaatagtttctgttgaatttttttttgttcatttttctgcacagtccattctgtttttattactatctaggcttgaaata

SEQ ID NO: 67 - DNA, 523 bp, Homo sapiens
  misc_feature: Incyte ID No: LI:794389.1:2000FEB01
  unsure 74: a, t, c, g, or other
tgtaaggactgcaaaagaccttttgtcgtgtgatgcagttcactctgcacaggagaattcatactggtgaaaanccctatgaatgcaaggaatgtggaaagtccttcagcgcccattcttctcttgttactcataagagaacacacagtggagaaaaaccgtataaatgcaaggaatgtggaaaagccttcagtgcgcactcttcccttgttactcataagagaacacacagtggagagaaaccctatacatgccatgcctgtgggaaggcctttaatacttcctccacactttgtcaacataatagaattcatactggtgaaaaaccctttcagtgcagtcaatgcgggaagtcctttagctgcagctctcaccttactcgacactgtagaatgtgtaatggaaaatttagcaaataaccaaaactcaaaatgttaattctgattattctgtatcatcaccagtactttgtactttgagtctttttaaatatgctctgttagtttgtatggaatgatatttc

SEQ ID NO: 68 - DNA, 561 bp, Homo sapiens
  misc_feature: Incyte ID No: LI:796010.1:2000FEB01
  unsure 92, 176, 216, 233: a, t, c, g, or other
ctcattagaaatcaaagaattcacacggggagagaccttacagatgtcatgaatggagaaatccttcagtgaaaagtcatcccttactcaanatcagagaacacacgtggggagaaatcatgaatgtcatgaatgtgggaaaacctcgtttaagtcagttctaactgtgcatcagnaaacacacaggggagaagccctatgaatgctatgcatgtngcaacacctttctcagnaaatccgacctcattaaacatcagagaattcacacaggagaaaaaccttatgaatgtaatgaatgtgggaagtcattctccgagaagtcaacccttactaaacatctaagaacacacagatgggaaatcttatgcatgtattcaatgtggaaaatttttctgctgctactacagtttcacagaacatctgagaagacacacaggggagaaaccttttggatgtaatgaatgtgggaaaaccttccatcagaagttggccctaattgttcaccagagaactcatataagacagaaaccctatggatgtaatgaatgtggaaaatcattc

SEQ ID NO: 69 - DNA, 543 bp, Homo sapiens
  misc_feature: Incyte ID No: LI:796324.1:2000FEB01
  unsure 51, 54, 458: a, t, c, g, or other
tctataagaattcagccctcattagaaatcaaagattcacacaggggaganacnttacagatgtcatgaatggagaaatccttcagtgaaaagtcatcccttactcaaaatcagagaacacacgtggggagaaatcatgaatgtcatgaatgtgggaaaacctcgtttaagtcagttctaactgtgcatcagaaaacacacaggggagaagccctatgaatgctatgcatgtggcaacacctttctcagaaaatccgacctcattaaacatcagagaattcacacaggagaaaaaccttatgaatgtaatgaatgtgggaagtcattctccgagaagtcaacccttactaaacatctaagaacacacagatgggaaatcttatgcatgtattcaatgtggaaaatttttctgctgctactacagtttcacagaacatctgagaagacacacagggganaaaccttttggatgtaatgaatgtgggaaaaccttccatcagaagttggccctaattgttcaccagagaactcatataagacaga

SEQ ID NO: 70 - DNA, 567 bp, Homo sapiens
  misc_feature: Incyte ID No: LI:796373.1:2000FEB01
cactggagagaaaccctatgtatgcaatgaatgtgggaaagcttcagccagaagacatgtttaatatcccatcagagatttcacacaggaaagacaccctttgtatgtactgagtgtggaaaatcctgctcacacaagtcaggtctcattaaccaccagagaattcacacaggagagaaaccctatacatgcagtgactgtgggaaagctttcagagataaatcatgtctcaacagacatcggagaactcatacaggggagagaccgtatggatgctctgattgtgggaaagctttctcccacttgtcatgccttgtttatcataagggaatgctgcatgcaagagagaaatgtgtaggttcagtcaaattggaaaatccttgctcagagagtcatagcttatcacatacacgtgatctcatacaggataaagactctgttaacatggtgactctgcagatgccttctgtggcagctcagacctcattaactaacagtgcgttccaagcagagagcaaagtagccattgtgagccagcctgttgccagaagttcagtctcagcagat

SEQ ID NO: 71 - DNA, 633 bp, Homo sapiens
  misc_feature: Incyte ID No: LI:796415.1:2000FEB01
ctctgctctgccaacactagtggaatatgatcacatcccagggatcagtgtcatttagggatgtgactatgggcttcactcaagaggagtggcatcatctggaccctgctcagaggaccctgtagaggaatgtgatgctggagaactacagccaccttgtctcagtagggtattgcattcctaaaccagaagtgatcctcaaattggagacaggcaaggagccatggatattagaggaaaaatttcgaagccagagtcatctgggtgagttagtgccagatggaatttaaagaattaattaataccagtagaaactattcaagaatgaagttcaatgagtttaacaaaggtggaaaatgtttctgtgatgaaagcatgaaataattcattttgaagaggaaccttctgaatataataacaatgggaacagcttctggctgaatgaagacctcatttggcatcagaagattaaaaattgggagcaaccttttgaatacaatgaatgtgggaaagctttccctgagaattcactcttccttgtacataagagagcttacacaggacagaaaacatgcaaatatactgaacatgggaaaacctgttatatgtcattttttattactcatcagcaaa

SEQ ID NO: 72 - DNA, 652 bp, Homo sapiens
  misc_feature: Incyte ID No: LI:798636.1:2000FEB01
  unsure 76: a, t, c, g, or other
taatgaatgtggtaaagccttaagctcccactcaacacttattattcatgagcgaattcatactggagaaaaaccntgtaaatgtaaagtatgtggaaaagccttcagacagagttccgctctcattcaacatcagagaatgcatactggagaaagaccctataagtgtaacgaatgtgacaaaacattcaggtgtaactcatcgcttagtaatcaccagagaattcatactggagagaaaccatatcgatgtttagaatgtgggatgtcttttggccaaagtgcagctcttatacaacatcagaggattcatacaggagaaaaaccctttaaatgtaatacatgtggaaaaacttttagacaaagctcatcacttattgcacatcaaagaattcatactggagagaaaccctatgaatgtaatgcatgtgggaaactctttagccagaggtcatcccttactaatcattataaaattcacattgaagaggactccttaaaagccgatttgcatgtgtgaaagccttaaaccaaaactcatcagagaatacatgcttgagagtgatttattaaatataatgaatattgagaaaactcttagttctcatcagatactaagttttaagaataaactttagctatgtaataactt

SEQ ID NO: 73 - DNA, 860 bp, Homo sapiens
  misc_feature: Incyte ID No: LI:800045.1:2000FEB01
  unsure 311, 500, 509, 541-543: a, t, c, g, or other
aaaattatgcacactggggaaaagcgctatgaatgtgatgactgtggagggactttccggagcagctcgagccttcgggtccacaaacggatccacactggggagaagccgtacaagtgtgaggaatgtgggaaagcctacatgtcctactccagccttataaaccacaaaagcacccattctggggagaagaactgtaaatgtgatgaatgtggaaaatccttcaattatagctctgttctggaccagcataaaaggatccacactggggagaagccctatgaatgtggtgagtgtgggaaggccttcangaacagctctgggctcagagtccacaaaaggatccacacgggggagaagccctatgaatgcgacatctgtgggaaaaccttcagtaacagctctggcctcacagtgcataaaaggatccacacagtttcagatgaactcccataatgaatgatgaatttgtgatgagggataccctggaagtggtattnacacattangctacaataaaaggttctaccgtggagaggannntgacacattcagtaactaatggaacacaccgtcaacatgaattcgcaccttacatgacagaagtgattcagggattcctatgaatagaaatgctgagaaggaacgcattttattgcagaagctaaaaagctaaagtaccagtcatctagagagaaggaaattaatgtttcttaataatcctgttaaatgtttgattgtttttggaatgtgttattgtaaagatgtcatgcaggacatgtatatgttgtctgttgtaaaatgttaacgaatactttgttcagggctcactctctctttgtcatgaaagccagctcctt

SEQ ID NO: 74 - DNA, 501 bp, Homo sapiens
  misc_feature: Incyte ID No: LI:800680.1:2000FEB01
gcgctctcggcccacacaatatgacctcggggaggatgcgaggaagatgaactgtgatgatccacttcttcttaatgaatgactgacttacctgagaaagaaactcagaggaagaggaaagaaagaagaggagggaatggctctttctcagggactgtttacattcaaggatgtggccatagaattctctcaagaggagtgggagtgcctggaccctgcccagagggccttgtacagggacgtgatgttggagaactacaggaacctgctttctctcgatgaggataacatccctccagaagatggttctcaccttgcagcctgtggacagagcacactgcctcttccttagaatcctacaaaatccgacccttttattttactcccgtaccttttatttctctcccttttctagctttctactctatccgggaacttagggagaccttagtcttcctgattccatattcttctaagatttgcctctgaaagttgcttttg

SEQ ID NO: 75 - DNA, 703 bp, Homo sapiens
  misc_feature: Incyte ID No: LI:800894.1:2000FEB01
gtctcgtccttactgctgtgtgtcctctgctcctagagtcccagcctctgtggccctatgacctgcaggtattgggagatccacaactaagtcgccaggaccccctggaagcctagaaatgggatcattgacatttagggatgtggccatagaattctctctggaggagtggcaatgcctggacactgcacagcagaatttatatagaaatgtgatgttagagaactacagaaacctggtcttcctgggtattgctgcctttaagccagacctgatcatttttctggaggaaggaaaagagtcctggaatatgaagagacatgagatggtggaagaatccccagttatatgttctcattttgctcaagatctttggccagagcagggcatagaagattctttccaaaaagtgatattgagaagatacaagattcatcatcatgcctgtgagctgggtccaataatgaatcactatcctacctgtggccaaatgcatatatgacagttacaactctaactgcagactgcatcggcatgtaaaatttaggtcaccagtgggctctctccatgtttgaatgtggtgattctaatggtcagcgaggtgtgcataggagagtcacaatctcaccttcaggtgggccttgtatcagcactctctctactaccttaagactgtatgacacatgggtgagctaaaaatgtt

SEQ ID NO: 76 - DNA, 256 bp, Homo sapiens
  misc_feature: Incyte ID No: LI:801015.1:2000FEB01
ggaagccggaaaatggactcagtggcctttgaggatgtggcagtgaacttcacccaggaggagtgggctttgctggatccttggcagaaaaaactctacagagatgtgatgctggaaacctataggaacctggcttcagtaggtgatgacgacaacattccttcacttagagaacaagttgcccatcaacgatatttcaagacctggcatgtggaaagggaatacttcagtaaataaaccaagcatggtgacagct

SEQ ID NO: 77 - DNA, 458 bp, Homo sapiens
  misc_feature: Incyte ID No: LI:801236.1:2000FEB01
  unsure 11, 25, 58, 61, 91, 428: a, t, c, g, or other
aaagttttttngcccacagtacatnattaatccgacatcagagaacccacacaggagnggnaaccatatgaatgtaatgaatgtgggaaantttcagccataccccagccttcattcaacatcaaagaattcatactggagaaaaaccctatgagtgtaatgcatgtggaaaggccttcaatcggagtgcacatcttactgaacaccagagaactcatactggagagaagccctatgtttgtaaagaatgtggaaaaaccttcagtcgaagtacacaccttactgaacatctaaaaattcattcttgtgtgaaaccctatcaatgtaatgaatgtcagaaactgttttgctatagaacatcactaattcgacatcagaggacgcatacaggagagaaaccctaccagtgtaatgaatgtgggaaatcnttcagcttaagctcagctctaactaaacat

SEQ ID NO: 78 - DNA, 604 bp, Homo sapiens
  misc_feature: Incyte ID No: LI:803335.1:2000FEB01
gggccagcctggggcttggttctatgtccctgcgggtcggtgcgagggcgaagaggaacccgtgggcccgggggatcccggggggccggaccagtgttccccagttgtgggagcagacgcgtgggcgcatcgcgggcgggcagggcctgaagtgcagctatgtttccagtgttctctggctgtttccaagagctacaagaaaagaataaatctctggagttggtgtcctttgaggaggtagctgtgcacttcacctgggaggagtggcaggacctggatgacgctcagaggaccctgtacagggacgtgatgctggagacctacagcagcctggtatcattggggcattgcattaccaaacctgagatgatcttcaagctagagcaaggagcagagccatggatagtagaagaaaccctaaacctgagactttcaggctaagcctccctccttttggtagaggcttttttataccatttgggaactggtttggataagctaccttaatgaaggacgacacatccctccagagatgataaaagactttttgtcttttctgatttaagaaaactttatctcgtaagctacctatagtttacaaaaa

SEQ ID NO: 79 - DNA, 641 bp, Homo sapiens
  misc_feature: Incyte ID No: LI:803998.1:2000FEB01
aggcttcaaccagtcctcaaaccttatggaacataagagaattcatactggtgagaagccctacaaatgtgaagaatgtgataaagacttcaactggtcctcacaccttactactcataaaagaattcatactggaggaaaaaccctacaaatatgaaaaatgtggcaaaactattaattaattctcaacgcttactgaacataagggaatttgtacaggagggaaaccctacaaatctgaagaatgtggcaagccttttagctattcctcaatccttactaaacattcatgtaattcatactggagggaattcctacaattgtgtggaatgttgcaatgcccttaaccagtccttaaggcttactacatataagacaactcatactggagagaaaccatgcatgtgtgaagaatgtgggaaagcctctaatagatcctcaattcttaagagacataagctaattcatacacaagagagactctacaaacctgaaagatgtgacaatgcttttggcaacacctcagacttttctgaatataaaagaaatcgtacagatgagaaatcctagaaaagtgaagaatatgacaaagcccttaagtggctgtcacacttgattgtaggtaagataactcatactgg

SEQ ID NO: 80 - DNA, 991 bp, Homo sapiens
  misc_feature: Incyte ID No: LI:478757.1:2000FEB01
gtgagaagggaaaggaggggtgagggtgcaggggccctcctaggaggacatcggacctgttgggccgagacctcattagagatctagagcaccggatgggaggagcagaggctcgatttgtgtgctgtccagactcccacaggctgggtgatggtgggagatttgtgcccattcagatgtggcggcagaggagggcaaggcccgaaggagcagacagcaccgcttcttggggacttgtgaaggcatcatgcggagggccgagcttagcagccaagtggaggacagcaccctccatgcctggattcgttactcgctcgttctcgatgttgactgctggcatattgcagcacaactagagatgtacggatgcccccatcttgatcttacagaatccagaggtgcagccgcaagaaagctacaccttctcggtttctctgctctgccaacactagtggatatgatcacatcccagggatcagtgtcatttagggatgtgactatgggcttcactcaagaggagtggcatcatctggaccctgctcagaggaccctgtagaggaatgtgatgctggagaactacagccaccttgtctcagtagggtattgcatcattcacagggtattgcattcctaaaccagaagtgatcctcaaattggagacaggcaaggagccatggatattagaggaaaaatttcgaagccagagtcatctggaattaattaataccagtagaaactattcaagaatgaagttcaatgagtttaacaaaggtggaaaatgtttctgtgatgaaagcatgaaataattcattttgaagaggaaccttctgaatataataacaatgggaacagcttctggctgaatgaagacctcatttggcatcagaagattaaaaattgggagcaaccttttgaatacagtgaatgtgggaaagctttccctgagaattcactcttccttgtacataagagagcttacacaggacaaaaa

SEQ ID NO: 81 - DNA, 680 bp, Homo sapiens
  misc_feature: Incyte ID No: LI:808532.1:2000FEB01
gcacaatttccagcttcagaaacatcacagaattcatactggggagaagccattcaaatgtgaaatatgtggtaagagcttctgtcttaggtcaagtcttaataggcattgcatggtccacacagcagagaaactgtacaaatctgaaaagtatggaagaggtttcattgataggctagatttgcataagcatcagatgattcatatgggacagaaaccatataattgtaaagaatgtgggaagagcttcaaatggtcctcatatcttttggtccatcaacgagtccacactggagaaaagccatacaaatgtgaggagtgtgggaagggctacattagtaagtcaggtcttgacttccaccatagaacccacacgggagagagatcttataactgtgataactgcgggaagagctttagacatgcttctagtattttgaatcataagaaactccactgccaaagaaagccattgaaatgtgaagactgtggaaagaggcttgtatgccggtcatactgtaaagaccaacaaagagaccacagtggagaaaacccatccaaatgtgaggactgtgggaagcgctacaagaggcgcttgaatctggatataattttatcattatttttaaatgacatataagttatacatatttatggagtgtgaaatttgatacatgtat

SEQ ID NO: 82 - DNA, 420 bp, Homo sapiens
  misc_feature: Incyte ID No: LI:443073.1:2000FEB01
aaaaccctatatgtgtaaggaatgtaggaaaacatttagccagaatgcaggccttgctcaacatcagagaattcatactggagagaaaccttatgaatgtaatgtttgtgggaaagcatttagctatagtggatctcttactctacatcagagaattcatactggagaaagaccctatgaatgtaaagattgcaggaaatctttcaggcagcgtgcacatcttgctcatcatgagagaattcatactatggagtcattcttgactctttcctctccctcaccctccacatcaaatcagttgccaagacctgtaggtttcatctcctgaatatttctggaatccacctcttgaatccatttccatcccatcatccttgtccaatgcacattaatatatttgacatgggatactcgagtagc

SEQ ID NO: 83 - DNA, 659 bp, Homo sapiens
  misc_feature: Incyte ID No: LI:479671.1:2000FEB01
cgtgcccgcacgtgcgtgtctcggtcagtagccctgcgcttctccttcactctcggcggttcaggaggctctgccgcagccggggccctcctgtgacctgcatgtactgggggattcgcagggaggatgtcgggacaccccggaagctgggaaatgaactcggttgcctttgaggatgtggctgtgaacttcacccaggaggagtgggctttgttggatccttcccagaagaatctctatagagacgtgatgcaggaaaccttcaggaatctggcttccataggaaacaaaggggaagaccagagcattgaagatcagtacaaaaattcttcaagaaatctaagatgaggtttatataactttccaagacaaggaagttgtgcaaagcctcacagctactaagaggctgggctgggactcaggattaacttcgtgactccaaagcccatgcacctctgcaagccacacgaatcaagcagcttctctaaacctttgaagtcctggaaagtaactcttctgcaatagaagcaagaatcctgtgagattgggatccatctagtactcttcaccatttggaacaactgcctccagagaatgcttctgacgcatcttggaagaacttggaataacctgaggaaatggtcgatttgctaatttag

SEQ ID NO: 84 - DNA, 772 bp, Homo sapiens
  misc_feature: Incyte ID No: LI:810078.1:2000FEB01
ccctatgtatgtaaggaatgtgggaaagccttcactcagtactcgggccttagtatgcatgtacgatctcacagtggagacaagccctatgaatgtaaggaatgtgggaaatccttccttacatcctcacgccttattcaacatataagaactcacactggagagaagccttttgtatgtgttgaatgtgggaaagcctttgcagtttcctcaaatcttagtggacatttgagaactcacactgaagagaaggcctgtgagtgtaagatatgtgggaaagtatttgggtatccctcatgtcttaataatcacatgcgaacgcacagtgcccagaaaccatacacctgtaaggaatgtgggaaggcttttaactattccacccaccttaaaattcacatgcgaatccacactggagaaaaaccctatgagtgtaaacaatgtggaaaggccttcagtcattccagttcatttcaaatacatgaaaggactcacactggagagaaaccctatgaatgcaaggagtgtgggaaagccttcacgtgaagagagttcctttagaattcatgaaaaaactcacacagaagagaaaccctataaatgtcagcaatgcgggaaagcttacagtcatccccgttcacttcgaagacatgaacaaattcactagtgagaaactgtccatgtaataaatgtgggaaagctctcatttgttccagttcactttaaagacatgaatgaactcactctggagagaagaagctgcatgaaaattact

SEQ ID NO: 85 - DNA, 441 bp, Homo sapiens
  misc_feature: Incyte ID No: LI:810224.1:2000FEB01
ggggagaaatcatgaatgtcatgaatgtgggaaaccctcgtttaagtcagttctaactgtgcatcagcaaacacccaggggagaagccctatgaatgctatgcatgtggcaacacctttctcagaaaatccgacctcattaaacatcagagaattcacacaggagaaaaaccttatgaatgtaatgaatgtgggaagtcattctccgagaagtcaacccttactaaacatctaagaacacacagatgggaaatcttatgcatgtattcaatgtggaaaatttttctgctgctactacagtttcacagaacatctgagaagccacacaggggagaaaccttttggatgtaatgaatgtgggaaaaccttccatcagaagttgccctaattgttcaccaagagaactcaatataatgacagacacgcactatagatgtactga

SEQ ID NO: 86 - DNA, 1072 bp, Homo sapiens
  misc_feature: Incyte ID No: LI:817052.2:2000FEB01
aattccccgggtcgacccacgcgtccgggtggaagagcacggcttccaggactcagagctgggtgacccctgtggggaacagccagacctggacatgcaggagccagagaacacgctggaggagtccacggaaggctccagcgagttcagcgaactgaagcagatgctggtgcagcagaggaactgcacggaggggatcgtgatcaagacagaggaacaagacgaccacttacaccacgaggaggaggatgagctgccgcagcacttgcaatcccttgggcagctgtccgggagatatgaggccagtatgtaccagaccccgctgcccggggagatgtcccccgagggcgaggagagccccccgcccctgcagctaggaaaccccgcagtgaaaaggctggcgccctccgtgcacggtgagcggcacctgagagccagcagcagcggaaccggcgcggcgagcggcccttcacatgcatggagtgcggcaagagcttccgcctgaagatcaacctcatcatccaccagcgcaaccacatcaaggaggggccctacgagtgcgccgaatgcgagatcagcttccggcacaagcaacagctcacgctgcaccagcgcatccaccgcgtgcgcggaggctgcgtctcacccgaacgcgggcccacgttcaaccccaagcacgcgctcaagccgcgtcccaagtcacccagctctggtagcggcggcggtggccctaagccctacaagtgccccgagtgcgacagcagcttcagccacaagtccagcctgaccaaacaccagatcacgcacacgggtgagcggccctacacgtgccccgagtgcaagaagagcttccgcctgcacatcagcttggtgatccatcagcgcgtgcacgcgggcaagcatgaggtctccttcatctgcagcctgtgcggcaagagcttcagccgcccctcgcacctgctgcgccaccagcggactcacacaggcgagcggcccttcaagtgccccgagtgcgagaagagcttcagcgagaagtccaagctcaccaaccactgccgcgtgcactcgcgcg

SEQ ID NO: 87 - DNA, 759 bp, Homo sapiens
  misc_feature: Incyte ID No: LG:892274.1:2000MAY19
ctgtcgggaaatgagatgggggcctggacttgggtcccacaaacagtgagggcattcccagtccagaccttaaccctgttttaggcatgggttcctggaggcacattgattccatcaccccaggaacaccaggaagtgcaggattagatctacctgccagagaaagaatcacattagttgggggagacaaacccatcaaagttcccactggtatttggggaacttcaccagcaggatacatgggactaattttaggcaaaagccgccttaacttgcaaggcatgactgtagtcccaggagctgttgactctgattatgaaggagaaactcaagtagttttaatgtcacaagatctttgggtttttgaactgggagaatatattgctcaattattgcttattccctgcaaattacacccttctccatgaaaggagaaacgaggaaataaagggtttgggagcacaactacatgggaaatctatctatcccgacccatagcctctaatagacccacctgtgtagtacaaattaaaggaaagaaattttatgggcttatggatacgggaactgatgtatcagtaatatctaaagacaattggcccacatcctggctcttgcaattaacttctacatccctagtggaagtaggaacagctcaaagtgttcaacagagtgctgagattttaccttgtcttggtccggatgggcagtcatgtacttttcagccttatgttgcaaatatagctatcagtttatggg

SEQ ID NO: 88 - DNA, 570 bp, Homo sapiens
  misc_feature: Incyte ID No: LG:1080959.1:2000MAY19
aaaaaaacaagttgctttatggaagaaagtaagtatagacagagagaaagggatctgatgaccaaagcagggaataaatgtttggagtccacggcatcctgagaacttcttgggaatagagtctaggcccccaatgctgtcactctcacccatcctcctctacacatgtgagatgtttcaggacccagtggcttttaaggatgtggctgtgaacttcacccaggaggagtgggctttgctggatatttcccagaagaatctctacagggaagtgatgctggaaactttctggaacctgacctctataggaaaaaagtggaaagaccagaacattgaatatgagtaccaaaaccccaggagaaacttcaggagtgtcacagaagagaaagtcaatgaaattaaagaagacagtcattgtggagaaacttttaccccagttccagatgacaggctgaacttccagaagaagaaagcttctcctgaagtaaaatcatgtgacagctttgtgtgtgaagttggcctaggtaactcatcttctaatatgaacatcagaggtgacactggacacaa

SEQ ID NO: 89 - DNA, 408 bp, Homo sapiens
  misc_feature: Incyte ID No: LG:1054900.1:2000MAY19
cggacgcgtgggctaggcccccagtgctgtcactctcacccatcctcctctacacatgtgagatgtttcaggacccagtggcctttgatgatgttgctgtgaacttcacccaggaggagtgggctttgctggatatttcccagaggaaactctacaaggaagtgatgctggaaactttcaggaacctgacctctgtaggaaaaagttggaaagaccagaacattgaatatgagtaccaaaaccccaggagaaacttcaggagtctcatagaaaagaaagtcaatgaaattaaagatgacagtcattgtggagaaacttttacccaggttccagatgacaggctgaacttccaggagaagaaagcttctcctgaaataaaatcatgtgacagctttgtgtgtggaaaac

SEQ ID NO: 90 - DNA, 532 bp, Homo sapiens
  misc_feature: Incyte ID No: LG:1077357.1:2000MAY19
cattcatggattgacttataaacagtcatgctatgtgatgaagaagcccagaagaggaaagcaaaggagtcagggatggctcttcctcagggacgcttgacattcatggacgtggccatcgaattctctcaggaggagtggaaatccctggaccctggacagagggctttatacagggacgtgatgttggagaactacaggaacctggtctttctgggaatctgtcttcctgacctaagtattatttccatgttgaagcaaaggagagagcccttgattctgcaaagtcaagttaaaatagtaaaaaatacagatggaagggaatgtgtcagaagcgtgaacacagggaggagctgtgtattgggaagcaatgcagaaaacaagcctattaaaaatcaacttggattaacccttgagtcacatctgtctgaattgcagctgtttcaagccggaaggaaaatttacagaagtaatccagttgaaaagtttacaaaccatcgttcctcagtttcaccacttcaaaaaatttctt

SEQ ID NO: 91 - DNA, 546 bp, Homo sapiens
  misc_feature: Incyte ID No: LG:1084051.1:2000MAY19
caacaagttacataagaacaaaaacctatgaatgtaatatatgtgaaaaaatcttcaaacaacctattcaccttactgaacatatgagaattcatactggtgagaaacctttcagatgtaaggaatgtggaagggcctttagtcaaagtgcatccctcagtacacaccagagaatccatactggtgagaaaccctttgaatgtgaggaatgtgggaaagccttcagacatcgctcatcacttaatcagcatcatagaactcacactggggagaaaccctatgtatgtgataaatgtcagaaagctttcagccagaacattagcttggttcaacatttgaggactcattctggagagaaaccttttacttgcaatgaatgtgggaaaacctttagacagattagacaccttagtgaacatataagaattcataccggggagaagccctatgcatgcactgcatgttgtaaaacctttagtcatagagcgtatctaacacatcaccagagatccatactggggagagacctacaatgtaaagaatgtg

SEQ ID NO: 92 - DNA, 1386 bp, Homo sapiens
  misc_feature: Incyte ID No: LG:1076853.1:2000MAY19
gcctttagtcgatgttcttcccttgtccaacatgagaggactcatactggagagaaaccttttgaatgtagcatatgtgggagggcttttggtcagagcccatccctttataaacatatgaggattcataagagaggcaaaccttaccaaagcagtaactacagcatagatttcaagcacagcacatctctcactcaggatgaaagcactcttaccgaagtgaaatcctaccattgtaatgactgtggggaagactttagtcacattacagactttactgaccatcagaggatccatactgcagagaacccctatgattgtgagcaggcttttagtcagcaagctatttctcatcctggagagaaaccctatcaatgtaatgtatgtgggaaagctttcaaaaggagtacaagtttcatagagcatcacagaattcatactggagagaaaccctatgaatgtaatgagtgtggagaagcctttagtcgacgctcatcgcttactcaacatgagagaacccacactggagagaaaccctatgaatgtattgactgtgggaaagcctttagtcaaagttcatctctcattcagcatgagagaactcatactggagagaagccctatgaatgtaatgaatgtgggagagccttccgaaaaaaaaccaacctgcatgatcatcagagaattcatactggagaaaaaccctattcttgtaaggaatgtgggaaaaacttcagccgaagttcagctcttactaaacaccagagaattcatactcgaaataaactctaggaaccgtgaaattaaggaatttgcagaatgctttagctaaaatgttctgattcaggatcagaggattcttagagagcttgggaatgtaatgaattacgtgtgtgtttatacgttgtgtgtggagaaaactgccagtagacagatttttttttttttaacataaagacacacattctcagatctgattacagactagtgtaaaaacagctacatgtatgtagctggttggggatgatatgcctgtatgttggacttggctttggaatatatgtatgcaggatatcatcaagtttcaacatcttgacttgtgacccccaatgtcaacagcttttttaaaaagcaaattcctgcagtaatgaccaaaacccattttaaaaattgcttgacaactgcactcaactggcagctcttacattaacttcaccatggaaaccagttccaactccaggaagtcaccattcaaagaattagatcaattagcccaaccacttcattggtccagtatgaagactggaaagccaaagatgtgacgtggttcccacagtatgatacagcctataagggtaaagctgggttaaaaatgcggttcctgga

SEQ ID NO: 93 - DNA, 1039 bp, Homo sapiens
  misc_feature: Incyte ID No: LG:481631.10:2000MAY19
acaggattgacttctaaagactcttggtacctgaggaagaaacccagaagaggaagaggaaagcaaaggagtcggggatggctctttctcagggtctattgacattcagggacgtggccatagaattctctcaggaggagtggaaatgcctggaccctgctcagaggactctatacagagacgtgatgctggagaattataggaacctggtctccctggatatctcttccaaatgcacgatgaaggagttcttgtcaacagcgcaaggcaacagagaagtgttccatgcagggacattgcaaatacatgaaagtcatcacaatggagatttttgctaccaggatgttgataaagatattcatgactatgaatttcaatggcaagaagatgaaagaaatggccatgaagcacccatgacaaaaatcaaaaagttgacaggtattacagaacgatatgatcaaagtcatgctagaaacaagcctattaaagatcagcttggatcaagctttcattcgcatctgcctgaaatgcacatatttcagaccgaagagaaaattgataatcaagttgtgaagtctatccacgatgcttccttggtttcaacagcccaaagaatttcttgtaggcccaaaacccatatatctaataaccatgggaataatttctggaattcttcattactcacacaaaaacaggaagtacacatgagagaaaaatctttccaatgtaatgagagtggcaaagcctttaattacagctcactcttaaggaaacatcagataatccatttagcagacaaatataaatgtgatgtatgtggcaagctctttaatcagaagcgaaacctagcatgccatcgtagatgtcacactggtgagaatccttacaagtgtaatgagtgtggcaagaccttcagtcagacgtcatcccttacatgccatcgtagacttcatactggagagaaaccttacaaatgtgaagaatgtgacaaagctttccatttcaaatcaatacttgaaagacataggataattcatac

SEQ ID NO: 94 - DNA, 521 bp, Homo sapiens
  misc_feature: Incyte ID No: LG:1088431.2:2000MAY19
cggatctcgcggggctactggcgctctcggcccacacaatatgacctcggggaggatgcgaggaagatgaactgtgatgatccacttcttcttaatgaatgactgacttacctgagaaagaaactcagaggaagaggaaagaaagaagaggagggaatggctctttctcagggactgtttacattcaaggatgtggccatagaattctctcaagaggagtgggagtgcctggaccctgcccagagggccttgtacagggacgtgatgttggagaactacaggaacctgctttctctcgatgaggataacatccctccagaagatggttctcaccttgcagcctgtggacagagcacactgcctcttccttagaatcctacaaaatccgacccttttattttactcccgtaccttttatttctctcccttttctagctttctactctatccgggaacttagggagaccttagtcttcctgattccatattcttctaagatttgcctctgaaagttgcttttg

SEQ ID NO: 95 - DNA, 1243 bp, Homo sapiens
  misc_feature: Incyte ID No: LI:401619.10:2000MAY01
gctcttcatcctttaccaaagagacaagcacttgaaaaaagcaatggtaccagcgcggtctttaaccccagcgtcttgcactaccagcaggctctcaccagcgcacagttgcagcaacacgccgcgttcattccaacaggtatgtgcccttactgccctacgtcctgtgcccttctggtcatgtgctttcttctcatttctctaagctgtttggtggcatctagtttgcttttgaaggtataatacagtttgaaattcatcgttgtcctagctatctaaatgtatttaccttactttgaatgatagctaaagactgttaggattctaaagccaaatatttgatagattgaagagacagatttaacccatgagaaacagcagttagggcttttggtttcttgtatttgcacaagccctgtaaaattgtttatgtaaataagaccttttatgtgtgacaattgaaatttgtccttaactctgaatgacctaaaaatagcaattccagtaaatactaaccatttttttctatttctattcagagcactaaaacaatgaggctattcaaattaaagcaattctctactcatatttttatattcattctatctctttctccatccttctcaactttcaccaagttcacaagtatatagagctcttatcctcagtgtctaagccaatgcctgatactattacgtacgatgtgcattaactatgattccactaaaagatccattgtaatagtcatagaatcttagagtttaaaggactcttagtgatctcctcatccagctgattgttttacagatgagaaaactgaggccccctaaatgagaagtgactttccaaggtgccacaactaatgagaaaaagaactgagtttccctgtgaccaaacccatttacatcacattctaccacctgggcccgcctatatatacacattccacagagttctcctgaaaaaagaaaaaagcagataaaagtgaatttttaaataactgaccccaaaaagtcagataaaagtaaaaaaacaaaagtataaatcatgtcatccctcccccatttgcaccgacatctctaaccacagacacacacacgcacaccatacgcaaagatagtcaccataattgaccatgtttttcaccttttagtcaatgttagaagcaaggggtaacttaagtgctgagttgggagagcctccattgagttctttgagagtcaacattttcagcgccggtagt

SEQ ID NO: 96 - DNA, 4338 bp, Homo sapiens
  misc_feature: Incyte ID No: LI:1144007.1:2000MAY01
  unsure 2673, 3345, 4031: a, t, c, g, or other
cgtgttccgacccgctaggccccgcgcggctcggaatccggcggcgctgtttcggtcgggagtgggtgggagagaagccggggcaggggaggagccgccggagctgtcggagccggcccttggaagaaaatcctcgctgtgtccaggctgaggcggggggctaatgacagtgtgagctctagatggtgtgagaccaccccaaagccaagaaatggctacagccgtggaaccagaggaccaggatctttgggaagaagagggaattctgatggtgaaactggaagatgatttcacctgtcggccagagtctgtcttacagagggatgacccggtgctggaaacctcccaccagaacttccgacgcttccgctaccaggaggcagcaagccctagagaagctctcatcagactccgagaactttgtcaccagtggctgagaccagagaggcggacaaaggagcagatcctagagctgcttgtgctggaacaatttcttaccgtcctacctggagaactacagagctgggtgcggggccaacggccagaaagtggcgaggaggcagtgacgctggtggagggtttgcagaaacaacccaggagaccaaggcggtgggtgactgtccatgttcacggccaggaagtcctgtcagaggagacggtgcatttaggagcggagcctgagtcacctaatgagctgcaggatcctgtgcaaagctcgacccccgagcagtctcctgaggaaaccacacagagcccagatctgggggcaccggcagagcagcgtccacaccaggaagaggagctccagaccctgcaggagagcgaggtcccagtgcccgaggacccagaccttcctgcagagaggagctctggagactcagagatggttgctcttcttactgctctgtcacagggactggtaacgttcaaggatgtggccgtatgcttttcccaggaccagtggagtgatctggacccaacacagaaagagttctatggagaatatgtcttggaagaaagactgtggaattgttgtctctctgtccattcccaatcccccagacctgatgagattctcccagggttagacgaggaagagcctggggtcccagatatccaagagcctcaggagactcaagagccagaaatcctgagttttacctacacaggagataggagtaaagatgaggaagagtgtctggagcaggaagatctgagtttggaggatatacacaggcctgttttgggagaaccagaaattcaccagactccagattgggaaatagtctttgaggacaatccaggtagacttaatgaaagaagatttggttactgaatatttcttcaagtgaatagttttgtggaaccttcggggaaactacacccagtccaccccctgttagggaggcatcatgactgttctgtgtgtggaaagagcttcacttgtaactcccaccttgttagacacctgaggactcacacaggaggaggaaaccctataaatgtatgggaatgtgggaaaaagttacacacggaggctcacatcttgccagggcaccaaaaggttcacaaggatgaacgcgccttacaaatatcccctaaaccggaagaattttggaagagacctcccctgtgacacaggctgagagaactccatcagtggagaaaccctatagatgtgatgattgcgggaaagcacttccgctggacttcagaccttgtcagacatcagaggacacatactggagaaaaacccttcttttgtactatttgtggcaaaagcttcagccagaaatctgtgttaacagacacaccacaagaatccacctgggaggcaaaccctacttgtgtggagagtgtggtgaggacttcagtgaacacaggcggtacctggcgcaccggaagacgcacgctgctgtaggaactctacctctgcagcgagtgcgggcgctgcttcacccacagcgcacggatcgccaagcacttgagacgcaacgcctcagtgaggccctgccgatgcaacgaatgtggggaagagcttcagtcgcagggaccacctcgtcaggcatcagagaacacacactggggagaaaaccaattttttcccaacgtgccctacctgtggaaaaagcttcagcagaggatatcacttaattaggcatcagaggaccccactcagaaaagacctcctagctaggtccccatgtgaggagatctgctttcagccctcacctaagggaggtgaggaagaggaaaagccctcttgtcagcctgggaagaccttttcgagggagtctccctgacctgctcagatctgacattacctcttcctgcaactaaacacgagcctgggcagaacctctcagccttcctctacgccttgaggggcatgtttcatccaaagtacaacctgaattgaggcttctccttcactcggagtgcacctgcctctaccatcatgggtataaacgtaggagaactaagagacttaagagcgtcgtggttcctatatcgtccaaaaaataggctgttacatatcctaaagactgctcaacaagcttcaagttgaaaagtggccaaaggacagcccctttaaggtttgggaaggggacgaagcctgaagggattctgtctttactgggggtcaaatcttaaagcacacagttctggganttcaagacaggacggtttgcgtcctgatgggctttgccacacattcacagggataacttgcatagattccctcgctgtcttgattcacttcttaccatgcactttcctttgatgctgaggagaaatggaagtgggcgaaaaatctcaaggctgcttcatgtggaccttggtcaagctggctccctcccccagcgtcaaattgttatcaggtgccaaacactgctagaaagggggggcctaggtcagaagcctctttccatacgagttttggttttgtttttaatatttttttcctattaaaatacttcatgcatttaaccttcccgttattcaaccagtctcttgggttgcatccctagcacttctcactacaagtgagatggtagtgtttgagtgcttattgagtaaagcataattcggtcataatgaaatcgttcacattccctcatatgcacaagcccaccaaccccttcacaccccccttcacaggggtcgtatgagtaaggggatttggaaactgtcaaccttacaaaggcactataacaattacagaatcatgattgccatgggccactttatttacatgaagacaactgggagaacgactaagaccaaattatggaaaataagaaaaagctgttgctgggcaagaccatcaagactgttctgacncaccctgtccccatcatcccgtgactgagtactgtgacatcacggaaagtgttgaacctgggaacctgtagaggattctcccacaggattaattgcgcttcaatgtatttgttttgtttgctttttcttacgtgattttatgttcatagagctagaaagtagcatctcatgatggcccaacaatctctgttgccagttaaaggttccttggagatgaggctgaataattatgaacctcacccttctctgattgtgggagtggcaagaactggggagaccgtcctctccatagtggagcacagggtatggggttaaagcatggaacaggggagagtcttctgtgcctggtttcttctcctctatctccataatgcattatgggcccgaggaataggggagggttaataagactccaaccctaatggcccaacagggaaattctcattttggtcgatgatattctgatggactggtttggtcttaataccagtcaaccgttgtccttctggaaatatacatatatgaaataacataacggtaacacttggcagccaagttccctggtttctgggacttcccatcttacccattccttttccagggcttccagtgtcctgatacttctggagggtggttcatactccaaattagattctggggagttacagagtaattttttccttggnagggaaagggaagggttgggggatggatttaggcagagttccggtggaaacattatttgcactctgagataagatccaagcctggagtttgcagaagatactgtcctaataagcaggcatttctaaaccaagtatctaagcctaagcacagcttgtcctgggtgaaatgtctgccacaaaagatagtttctcctagctcagacttaaccatttataaaggttggtaaaatactggcagtgacaacaaattgactttttaattttcttatttgcattattccaataaatgaaaatctgtcagagttcg

SEQ ID NO: 97 - DNA, 1827 bp, Homo sapiens
  misc_feature: Incyte ID No: LI:331074.1:2000MAY01
  unsure 32, 57: a, t, c, g, or other
cctacaccatggaggtgctgctgcagaatcancggctgcgggaccacaatatccggncgggcgaggatagatgtgctcacgcaagaaggctgagtttatcaagggcagtcacaagtgcaacgtttgttcacggactttcttctcggagaacgggctacgggagcacctgcagacgcaccggggccctgccaagcactacatgtgtcccatctgtggtgagcgcttcccttcgctgctgacgctcaccgaacacaaggtgacccacagcaagagcctggacacgggcacctgtcgcatctgcaagatgcccctgcagagcgaggaggagtttattgagcactgccagatgcaccctgacctgcgcaactcactcacgggcttccgctgtgtggtctgcatgcagacagtcacttccacgcttgagctcaagatccatggcaccttccacatgcagaagctggcgggcagctcagcggcgtcctcccccaatggccaggggctgcagaagctctacaagtgcgccctgtgcctcaaggagttccgcagcaagcaggacctggtgaagcttgacgtcaatgggctgccctacggcctctgcgccggctgcatggcccgcagagccaacggacaggtgggtggcctggccccgcccgagcccgccgaccggccctgtgccggcctccgttgccccgagtgcagtgtcaagtttgagagtgccgaagacctggagagccacatgcaggtggaccaccgtgacctcacgccggagaccagtgggccccggaaaggcacccagacatcgccagtgccccggaaaaagacataccagtgcatcaagtgccagatgaccttcgagaacgagagagagatccaaatccacgatgccaaccacatgattgaggaaggcatcaaccacgagtgtaagctgtgcaaccagatgttcgactccccggccaagctcctctgtcacctcattgagcacagcttcgagggcatgggcggcaccttcaaatgccccgtgtgtttcacagtcttcgtccaggccaacaagttgcagcagcacatctttgccgtgcacgggcaggaggacaagatctacgactgctcacagtgccctcagaagttcttcttccagaccgagctgcagaaccacacgatgagccagcacgcacagtgagggatcgctcaacaggacacctctccgcagaaggcttgccggagacgccgtggggagggccatttgaacattacatccaatcaaagtgtcatttgcaacccagatgtaaaactctaatgatttggccatgaggcgctgctattataagcagctggaaatgaatattaatggcagagattaaaagtattccatgctcagtattttttattgtcctgctacagctagtgtgcttttagactttccgccgcagactacatttctagagttagagaaacctgctttttaaggctattgtcctttgttccttcatgtattatattgatagtttttaaaaaagaattagtgtgattttttttctttgcttcttttttttctttcttgtttttcttcccccccaccccctacccccttcggttaactactttttaattgcaattctaggtaattgtgcatcgtgatgtgattgcttggctattgtctgaatatttccttttaattttttaattaaagactaatgctttgattggatttgccagttcaccggacagtgattaaaactatgtaatgaatataatcggtttcagtgcaactggatggtctgcttttaaatgtgacttaatctgactgcagtaactagtacagttcaataa

SEQ ID NO: 98 - DNA, 825 bp, Homo sapiens
  misc_feature: Incyte ID No: LI:1170349.1:2000MAY01
gccgctgcttcaggtcggcgggctccagggagacctgggtgggcagcgtcgccgtttctcctttcttgggcagtatttttcccagcgccacgcggaggctgggccattatgagctctgcatttccaggacctggtcactattcaggacacggttccagcgcagtgcgcgttagccatgtctcagggatgagtgacattccaagatgtggccattgacttctccaaggaagagtggggattcctgaaccctgctcagagagatttgtacacaactgtgatgctggagaattatcagaacctggtctggctgggactttccatttctaaatctgtgatttcactgttggagaaaaggaaactgccttggataatggcaaaagaagagataagaggcccattgccagatgtgccaggtgcagagattaaggagttatctgcaaagagggctattaatgaagtattatcgcagtttgacacagtgataaaatgtacaagaaacgtatgtaaggaatgtggaaatctatactgccacaatatgcagcttactctccataagagaaatcatacacaaaagaaatgcaatcagtgtttagattgtgggaaatacttcactcgtcaatcacctctcattcagcatcaaagaatccacacgggagagagaccctataaatgtaacgaatgtattaaaaccttcaaccagagggcacaccttacctagcatgagagaattcacactggtgagaaaccttacaaatgtaaggaatgcaggaaaaccttcagccagatgactcatctcacacagcatcagactacacatatgagaga

SEQ ID NO: 99 - DNA, 1100 bp, Homo sapiens
  misc_feature: Incyte ID No: LG:335097.1:2000FEB18
tcatctgtgctgtgaattatgtgctgtattgactctcaagcatgatgaccattggtggtttctgtaccatttcctgttactttactgaaacacacctactccattaacttcttgggttaagtctagaaagtaacagtttacttgtaaaccacatttcttatccccaataagtatttttttaagattattaaagttcattattactaccctatgatgtgaaagtgtcatttgcttaatctttttaattttttattctcaacctcatcttactgaagagaataaaactcttttaccatattcttaaaatgtggaattctcggccaggtgcagtgctcacgcctgtaattccatcactttgggaggccaaggtgggtggatcatctgaggtcaggagttcaagaccagcctggccaacatggtgaaaccccgtctctactaaaaatacaaaaattatctgggtgtggtggcgcgtgcctgtaggcccagctactcaggaggctgaggcaggagaattgcttgaacccaagaggtggaggttgcagtgagcctagattgctgccactgcactccagcctgggtgacagcagaactctgtctcaaaaaaaagatgtggaattcttttctgcaaatgttctctaatagtataccttcttcagtctgtcgatatatgtatgctattattttacaagtaatacatgttgattgtattggaaattatagaaaagattatattggattgtttagaaaatatttttaaatgtgaagaaaaatataaaaattactcccttgttccactttccccactctcaagtcagactatgttgttttcatagttagtagctagcagtctaccccactagattatatgcttcacagagggaagggaccctcaagacttcactggattgagtagcacccaataccttgcttgctgcctggtttgtgatgggcatactgtaagaaaaaaaaatctgaatgacaaaatgtttttccataataccagacttcctcttgaagagatgggtcgtaatgttgtagtcttacatgcttacgtagacgatcaaagcaagaatactcaataaatggctatttaccacttg

SEQ ID NO: 100 - DNA, 584 bp, Homo sapiens
  misc_feature: Incyte ID No: LG:1076451.1:2000FEB18
gtgtacttactttctgccattatatcctctttcttaataaagggaaccacatcatattcctaatcttattactattaatgacagcacaggcatcagatttcaaggtgacttgtatgggcaccccatttttcttctgttttggctaacactttactcgtattgtttatgagcccccatcagtcctcagttcttaatcttatttcaaaaactgtggtcatgggaggctcagatgggtcataacacacattaggttggtcatttcctgggctatgtaccttgtatagaataacattatacaagcaagttctttttagagttctagtacacttataataaccataaaataataggaccatagcaaccttttgtcctacctcagtgacttgatgtatacactaggaacagtcctcagtccaaggaaggtcagttgaagtccttactgtacaagtccaaatgttaaggaacatgagtcccgcgatgagttttctcatgcttcagccgtgcgtggaccagtcagcttccgggtgtgactggagcagggcttgtcgacttcttcagagttactttgcaggagttggcgaagc

SEQ ID NO: 101 - DNA, 392 bp, Homo sapiens
  misc_feature: Incyte ID No: LI:805478.1:2000FEB01
  unsure 21: a, t, c, g, or other
gccaacccctgcaaagtgacnctgaagaagacgacaagctctgctccagtcacacccagaagctgactggtccacgcacggccgaagcatgagaaaactcattgcggaactcattttccttaaaatttggacttttacagtaaggacttcaactgaccttcctcagactgaggactgttccagtgtatacatcaagtcactgaggtaggacaaaaggttgctacagtcctattattttatggttattataagtgtactggaactctaaaaataacttgtttgtataatgttattctgtacaaggtatgtagcccaggaagtgaccaacctgatgtgtgttatgacccatctgagcttcccatgaccacggtttttaaaataagattaaggac

SEQ ID NO: 102 - DNA, 856 bp, Homo sapiens
  misc_feature: Incyte ID No: LG:101269.1:2000MAY19
ctctcctttattattaactaaagagcattctctaccattgcccagctgaaagcacctagctcatagattctctgtggggagagtgaataaagaatgggggattgaggcacagagtgttaaaatagtgagacacaggattctaactggcagactggcactttatctcaattcttaactgctgtgttgcctctcactttaaagacatccacattccaccctggccttgcccgtctggtgagcccaatctctgctggtcagtcacgcagttgaggtcagggaaggagtaactcaagatgattttgatgttgcagttttaaatttcactttgacttgagctgggaaatcctttggcctattataccatggatgctaaaaatggttctaactgaaaacccaaaccaagaaatagcaacaagtctagaattcttactactacaaaactcacctggatccctaagggcacagcaaagaatgagctattacggcagcagctatcatattatcaatgcggacgcaaaatacccaggctacccgccagagcacattatagctgagaagagaagagcaagaagacgattacttcacaaagatggcagctgtaatgtctacttcaagcacatttttggagaatggggaagctatgtggttgacatcttcaccactcttgtggacaccaagtggcgccatatgtttgtgatattttctttatcttatattctctcgtggttgatatttggctctgtcttttggctcatagcctttcatcatggcgatctattaaatgatccagacatcacaccttgtgttgacaacgtccattctttcacaggggcctttttgttctccctagagaccc

SEQ ID NO: 103 - DNA, 856 bp, Homo sapiens
  misc_feature: Incyte ID No: LI:331087.1:2000MAY01
ccctctctctttctgccctgtagccgcgggcgtccaaatgaagctggaattcctccagcgcaaattctgggcggcaacgcggcaggatctggactgcttcgtcatcgacaacaacgggttcattctgatctccaagaggtcccgagagagtgactatgtatgactatcaggccatgtgcaaaccctcgagtcaccaccacagtgcagcccagcccctggtcagcccaatttctgccttcttgacggcgaccaggtggctgctgcaggagctggtgctgttcctgctggagtggagtgtctggggctcctggtacgacagaggggccgaggccaaaagtgtcttccatcactcccacaaacacaagaagcaggacccgctgcagccctgcgaccacggagtaccccgtgtttcgtgtaccagccggccatccgggaggccaacggaatcgtggagtgcgggccctgccagaaggtatttgtggtgcagcagattcccaacagtaacctcctcctcctggtgacagaccccacctgtgactgcagcatcttcccaccagtgctgcaggaggcgacagaagtcaaatataatgcctctgtcaaatgtgaccggatgcgctcccagaagctccgccggcgaccagactcctgccacgccttccatccagaggtgcgggttgaggcggatcgagggtgggctggattttcatccccaaaccctctgtgcctgggtctgtgcccctgcagacaggagcatatagggatgccaatgaacacacctgtgcctgtgcttctcgggggaaacattcgcgtttatgccctgtgacactgtgatataataagaaacagatctttattt

SEQ ID NO: 104 - DNA, 8530 bp, Homo sapiens
  misc_feature: Incyte ID No: LI:410188.1:2000MAY01
  unsure 6797, 7046, 7252, 7311, 7325-7326, 7502-7503, 7563: a, t, c, g, or other
gccgctgagcctgcgcccagtgccccgagccccgcgccgagccgagtccgcgccaagcagcagccgcccaccccggggcccggccgggggaccagcagcttccccacaggcaacgtgaggagagcctgtgcccagaagcaggatgagaagatggcaaacttcctattacctcggggcaccagcagcttccgcaggttcacacgggagtccctggcagccatcgagaagcgcatggcggagaagcaagcccgcggctcaaccaccttgcaggagagccgagaggggctgcccgaggaggaggctccccggccccagctggacctgcaggcctccaaaaagctgccagatctctatggcaatccaccccaagagctcatcggagagcccctggaggacctggaccccttctatagcacccaaaagactttcatcgtactgaataaaggcaagaccatcttccggttcagtgccaccaacgccttgtatgtcctcagtcccttccacccagttcggagagcggctgtgaagattctggttcactcgctcttcaacatgctcatcatgtgcaccatcctcaccaactgcgtgttcatggcccagcacgaccctccaccctggaccaagtatgtcgagtacaccttcaccgccatttacacctttgagtctctggtcaagattctggctcgagctttctgcctgcacgcgttcactttccttcgggacccatggaactggctggactttagtgtgattatcatggcatacacaactgaatttgtggacctgggcaatgtctcagccttacgcaccttccgagtcctccgggccctgaaaactatatcagtcatttcagggctgaagaccatcgtgggggccctgatccagtctgtgaagaagctggctgatgtgatggtcctcacagtcttctgcctcagcgtctttgccctcatcggcctgcagctcttcatgggcaacctaaggcacaagtgtgtgcgcaacttcacagcgctcaacggcaccaacggctccgtggaggccgacggcttggtctgggaatccctggacctttacctcagtgatccagaaaattacctgctcaagaacggcacctctgatgtgttactgtgtgggaacagctctgacgctgggacatgtccggagggctaccggtgcctaaaggcaggcgagaaccccgaccacggctacaccagcttcgattcctttgcctgggcctttcttgcactcttccgcctgatgacgcaggactgctgggagcgcctctatcagcagaccctcaggtccgcagggaagatctacatgatcttcttcatgcttgtcatcttcctggggtccttctacctggtgaacctgatcctggccgtggtcgcaatggcctatgaggagcaaaaccaagccaccatcgctgagaccgaggagaaggaaaagcgcttccaggaggccatggaaatgctcaagaaagaacacgaggccctcaccatcaggggtgtggataccgtgtcccgtagctccttggagatgtcccctttggccccagtaaacagccatgagagaagaagcaagaggagaaaacggatgtcttcaggaactgaggagtgtggggaggacaggctccccaagtctgactcagaagatggtcccagagcaatgaatcatctcagcctcacccgtggcctcagcaggacttctatgaagccacgttccagccgcgggagcattttcacctttcgcaggcgagacctgggttctgaagcagattttgcagatgatgaaaacagcacagcgcgggagagcgagagccaccacacatcactgctggtgccctggcccctgcgccggaccagtgcccagggacagcccagtcccggaacctcggctcctggccacgccctccatggcaaaaagaacagcactgtggactgcaatggggtggtctcattactgggggcaggcgacccagaggccacatccccaggaagccacctcctccgccctgtgatgctagagcacccgccagacacgaccacgccatcggaggagccaggcggcccccagatgctgacctcccaggctccgtgtgtagatggcttcgaggagccaggagcacggcagcgggccctcagcgcagtcagcgtcctcacaagcgcactggaagagttagaggagtctcgccacaagtgtccaccatgctggaaccgtctcgcccagcgctacctgatctgggagtgctgcccgctgtggatgtccatcaagcagggagtgaagttggtggtcatggacccgtttactgacctcaccatcactatgtgcatcgtactcaacacactcttcatggcgctggagcactacaacatgacaagtgaattcgaggagatgctgcaggtcggaaacctggtcttcacagggattttcacagcagagatgaccttcaagatcattgccctcgacccctactactacttccaacagggctggaacatcttcgacagcatcatcgtcatccttagcctcatggagctgggcctgtcccgcatgagcaacttgtcggtgctgcgctccttccgcctgctgcgggtcttcaagctggccaaatcatggcccaccctgaacacactcatcaagatcatcgggaactcagtgggggcactggggaacctgacactggtgctagccatcatcgtgttcatctttgctctggttggcaagcagctcctaggggaaaactaccgtaacaaccgaaaaaatatctccgcgccccatgaagactggccccgctggcacatgcacgacttcttccactctttcctcattgtcttccgtatcctctgtggagagtggattgagaacatgtgggcctgcatggaagttggccaaaaatccatatgcctcatccttttcttgacggtgatggtgctagggaacctggtggtgcttaacctgttcatcgccctgctattgaactctttcagtgctgacaacctcacagccccggaggacgatggggaggtgaacaacctgcaggtggccctggcccgcatccagaggggcctgcgctttgtcaagcggaccacctgggatttctgctgtggtctcctgcggcaccggcctcagaagcccgcagcccttgccgcccagggccagctgcccagctgcattgccaccccctactccccgccacccccagagacggagaaggtgcctcccacccgcaaggaaacacagtttgaggaaggcgagcaaccaggccagggcacccccggggatccagagcccgtgtgtgtgcccatcgctgtggccgagtcagacacagatgaccaagaagaggatgaggagaacagcctgggcacggaggaggagtccagcaagcagcaggaatcccagcctgtgtccggctggcccagaggccctccggattccaggacctggagccaggtgtcagcgactgcctcctctgaggccgaggccagtgcatctcaggccgactggcggcagcagtggaaagcggaaccccaggccccagggtgcggtgagaccccagaggacagttgctccgagggcagcacagcagacatgaccaacaccgctgagctcctggagcagatccctgacctcggccaggatgtcaaggacccagaggactgcttcactgaaggctgtgtccggcgctgtccctgctgtgcggtggacaccacacaggccccagggaaggtctggtggcggttgcgcaagacctgctaccacatcgtggagcacagctggttcgagacattcatcatcttcatgatcctactcagcagtggagcgctggccttcgaggacatctacctagaggagcggaagaccatcaaggttctgcttgagtatgccgacaagatgttcacatatgtcttcgtgctggagatgctgctcaagtgggtggcctacggcttcaagaagtacttcaccaatgcctggtgctggctcgacttcctcatcgtagacgtctctctggtcagcctggtggccaacaccctgggctttgccgagatgggccccatcaagtcactgcggacgctgcgtgcactccgtcctctgagagctctgtcacgatttgagggcatgagggtggtggtcaatgccctggtgggcgccatcccgtccatcatgaacgtcctcctcgtctgcctcatcttctggctcatcttcagcatcatgggcgtgaacctctttgcggggaagtttgggaggtgcatcaactataccgatggagagttttcccttgtacctttgtcgattgtgaataacaagtctgactgcaagattcaaaactccactggcagcttcttctgggtcaatgtgaaagtcaactttgataatgttgcaatgggttaccttgcacttctgcaggtggcaacctttaaaggctggatggacattatgtatgcagctgttgattcccgggaggtcaacatgcaacccaagtgggaggacaacgtgtacatgtatttgtactttgtcatcttcatcatttttggaggcttcttcacactgaatctctttgttggggtcataattgacaacttcaatcaacagaaaaaaaagttagggggccaggacatcttcatgacagaggagcagaagaaatactacaatgccatgaagaagttgggctccaagaagccccagaagcccatcccacggcccctgaacaagttccagggttttgtctttgacatcgtgaccagacaagcttttgacatcaccatcatggtcctcatctgcctaaacatggttcaccatgatggtggagactgatgaccaaagtgaagaaaagacgaaaattctgggcaaaatcaaccagttctttgtggccgtcttcacaggcgaatgtgtcatgaagatgttcgctttgaggcagtactacttcacaaatggctggaatgtgtttgacttcattgtggtggttctctccattgcgagcctgattttttctgcaattcttaagtcacttcaaagttacttctccccaacgctcttcagagtcatccgcctggcccgaattggccgcatcctcagactgatccgagcggccaaggggatccgcacactgctctttgccctcatgatgtccctgcctgccctcttcaacatcgggctgttgctattccttgtcatgttcatctactccatcttcggtatgtccagctttccccatgtgaggtgggaggctggcatcgacgacatgttcaacttccagaccttcgccaacagcatgctgtgcctcttccagattaccacgtcggccggctgggatggcctcctcagccccatcctcaacacagggcccccctactgtgaccccaatctgcccaacagcaatggcaccagaggggactgtgggagcccagccgtaggcatcatcttcttcaccacctacatcatcatctccttcctcatcgtggtcaacatgtacattgcagtgattctggagaacttcaatgtggccacggaggagagcactgagcctctgagtgaggacgactttgacatgttctatgagacctgggagaagtttgacccagaggccactcagtttattaccttttctgctctctcggactttgcagacactctctctggtcccctgagaatcccaaaacccaatcgaaatatactgatccagatggacctgcctttggtccctggagataagatccactgcttggacatcctttttgctttcaccaagaatgtcctaggagaatccggggagttggattctctgaaggcaaatatggaggagaagttcatggcagccaacccatccaagatctcctacgagcccatcaccaccacactccggcgcaagcacgaagaggtgtcggccatggttatccagagagccttccgcaggcacctgctgcaacgctctttgaagcatgcctccttcctcttccgtcagcaggcgggcagcggcctctccgaagaggatgcccctgagcgagagggcctcatcgcctacgtgatgagtgagaacttctcccgaccccttggcccaccctccagctcctccatctcctccacttccttcccaccctcctatgacagtgtcactagagccaccagcgataacctccaggtgcgggggtctgactacagccacagtgaagatctcgccgacttccccccttctccggacagggaccgtgagtccatcgtgtgagcctcggcctggctggccaggacacactgaaaagcagcctttttcaccatggcaaacctaaatgcagtcagtcacaaaccagcctggggccttcctggctttgggagtaagaaatgggcctcggccccgcggatcaaccaggcagagttctgtggcgccgcgtggacagccggagcagttggcctgtgcttggaggcctcagatagacctgtgacctggtctggtcaggcaatgcccctgcggctctggaaaagcaacttcatcccagctgctgaggcgaaatataaaactgagactgtatatgttgtgaatgggctttcataaatttattatatttgatatttttttacttgagcaaagaactaaggatttttccatggacatgggcagcaattcacgctgtctcttcttaaccctgaacaagagtgtctatggagcagccggaagtcctgttctcaaagcagaagtggaatccagtgtggctcccacaggtcttcactgcccaggggtcgaatggggtccccctcccacttgacctgagatgctgggagggctgaacccccactcacacaagcanacacacacagtcctcacacacggaggccagacacaggccgtgggacccaggctcccagcctaagggagacaggcctttccctgccggccccccaaggatggggttcttgtccacggggctcactctggccccctattgtctcccaaggtcccattttcccccttgtgttttcacgcaggtcatattgtcagtcctacaaaaataaaaggcttccagaggagagtggcctggggtcccagggctgggccntaggcactgatagttgccttttcttcccctcctgtaagagtattaacaaaaccaaaggacacaagggtgcaagccccattcacggcctggcatgcagcttgtccttgctcctggaacctggcaggccctgccagccagccaatggaagagaggggctgagccatgggggtttggggctaagaagttcaccagccctgagccatggnccctcagcctgcctgaagagaggaaactggcgatctcccagggctctctggaccatacncggaggagttttcnngtgtggtctccagctcctctccagacacagagacatgggagtggggagcggacgttggccctggccctgtgcagggaaagggatggtcaggcccagttctcgtgccccttagaggggaatgaaccatggcacctttgagagagggggcactgtggtcaggcccagcctctctggcnnagtcccgggatcctgatggcacccacacagaggacctctttggggcaagatccaggtggntcccataggtcttgtgaaaaggctttttcagggaaaaatattttactagtccaatcacccccaggacctcttcagctgctgacaatcctatttagcatatgcaaatcttttaacatagagaactgtcaccctgaggtaacagggtcaactggcgaagctgaggcaggccagggggcttggctgccccattccagctctcccacggagcccctccaaccgggcgcatgctcccaggccacctcagtctcacctgccggctctgggctggctgctcctaacctacctcgccgagctgtcggagggctggacatttgtggcagtgctgaagggggcattgccggcgagtaaagtattatgtttcttcttgtcaccccagttcccttggtggcaaccccagacccaaacccatgcccctgacagatctagttctcttctcctgtgttccaatttgagtccaagtgtgggacaaggttttaactgtccaagcagagatttctccaagtggaaatccatatttttgtgagatctccatgctttgctctcaaggcttggagaggtatgtcccacctccatgggttgctcaccgcctgctacacaggcaggtaatgcggattggaggcaggtcgggctgccagcccagctggccggaaggagactgtggtttttgtgtgtgtggacagcccgggagctttgagacaggtgcctgggggctggctgcagacggtgtggttgggggtgggaggtgagctagacccaacccttagcttttagcctggctgtcacctttttaatttccagaactgcacaatgaccagcaggaggggagaagagagtaggaaaaaggagggaaggaaagacatcaagtgccagatgttgtctgaactaatcgagcacttctcaccaaacttcatgtataaataaaatacatatttttaaaacaaaccaataaatggcttacatgacctgg

SEQ ID NO: 105 - DNA, 2965 bp, Homo sapiens
  misc_feature: Incyte ID No: LI:1188288.1:2000MAY01
ctgaggtggcgtgggcgccctgcgggccgggcctccgcggcgcgtccagtcccagtctccgcgctggtctggcccggtccctcagctccaccccctgcctccccctcccgcccgctcgcgcctcctgaaaagccagctcgcccggggcggcggcgcagagccgggccggcgcacgaggcagccagcgcggccatgacggcggagaaggcgctgcccctgggcaatgggaaggctgctgaggaggcgcgggagtccgaggcgccgggtggcggctgcagcagcgggggcgcggcgcccgcgcgccacccgcgcgtcaagcgcgacaaggcggtccacgagcgcggccactggaacaacaaggtggagttcgtgctgagcgtggccggggagatcattgggcctgggcaacgtgtggcgcttcccctaccttgtgctacaagaacggaggaggggcattcctgattccctacgtggtgttttttatttgctgtggaattcctgtttttttcctggagacagctctggggcagttcacaagtgaaggtggcattacgtgttggaggaaagtttgccctttatttgaaggcattggctatgcaacacaggtgattgaggcccatctgaatgtgtactacatcatcatcctggcatgggccattttttacctgagcaactgcttcactactgagctaccctgggctacctgtgggcatgagtggaacacagagaattgtgtggagttccagaaactgaatgtgagcaactacagccatgtgtctctgcagaaatgccacctcccctgtcatggagttttgggagcaccgggtcctgggcatctctgacgggatcgagcacatcgggaaccttcgctgggagctggccttgtgtctcttggcagcctggaccatctgttacttctgtatctggaaggggaccaagtctacaggaaaggttgtatacgtgactgcgacattcccctacatcatgctgctgatcctcctgatacgaggggtcacgttgcccggggcctcagagggcatcaagttctacttgtaccctgacctctcccggctctccgacccccaggtctgggtagatgctggaacgcagatctttttctcctatgccatttgcctgggctgtctgaccgctctgggaagttataacaattataacaacaactgctacagggactgcatcatgctctgttgcctgaacagcggcaccagctttcgtggctgggtttgccatcttctcagtcctgggttttatggcgtacgagcagggggtacccattgctgaggtggcagagtcaggccccggtctggcctttattgcgtaccccaaggcggtcaccatgatgcccctctccccgctgtgggccaccttgttcttcatgatgctcatcttcctgggcctggacagccagtttgtgtgtgtggaaagcctggtgaccgccgtggtggacatgtaccccaatggttttcccggaggggttaccggcgggagctgttcatcctagccttgtctgttatctcctattttctgggcctcgtgatgttaacagagggtggcatgtacatcttccagctctttgactcctatgccgccagtgggatgtgccttctcttcagcggccatctttgagtgcatctgcatcggctgggtgtatgggaagcaaccggttctatgataacattgaagacatgattggctaccggccaccgtcgctcattaagtggtgctggatgatcatgacccctgggatctgacgacggggatcttcatgcttgcttcttgatcaaggtacaagaccactgcaaggtacaacaacatctacacctacccagcctggggctaatggcattggctggctcatgggccctgtcctccatgctctgcatcccgctctggatctgcatcacagtgtggaagtacggaggggacgctgcccgagaaactccagaagttgacgacccccagcacagatctgaaaatgtcggggcaagacttggggtgagcccacggatggtgacagttaatgactgtgatgccaaactcaagagtgacgggaccatcgcagccatcacagagacaggagaacgccacttctgagcgggccaaaccaaagccatcttggcggctccttcttcctttcttccccccgtgtatgtaaatgaattcctgaaccccatacttcacctaatggtaggggcttgcttgttttgcacaggattaattaacaagttaattttaaggtggccactgtacactgctctaaagtcatatcccctccccgccccccagttcatcatggaagtaaccactacaaagagataacactgtacggggactgccagatcttctgtcctagggcagttttaatcaatgttttctagggattaggaagaagtgtataatattgtaaaactttgtattactgggggttgtgggccaggtggggtggggagtgatggctgtcctcctcgtgtcggcctttgtaatgaccgttctgtgtcccagtgtatgtctctgaccatccacagccgcccctcctccatacccccgggataaattttccctcaaaccctccccttccacaagggacactggggttggcagacagcaaggctattgtggcagagaagaaaaagtccagcagactcaggactcctgggctgcaggcccccctctggcctgatcccatgaaggtgaccttgggaactccctttccctccctgggcctcagtttccccctctccccaatgagaggaggagcccgattggggtatttcttagggatatctctttgtgtgcctatgattgcttccagacctgccgtggaccttggcttccttctgaagacttgcaggccattatctccgccctccccagttgtacctcctccccacctgcttatttaaaatccagtttcttgtcgaaacacacacaaaacacacacaaa

SEQ ID NO: 106 - DNA, 2376 bp, Homo sapiens
  misc_feature: Incyte ID No: LI:427997.4:2000MAY01
cgcgtacaggaggcggcggcggctcccagtcaccggcccccgacggcgagcgcacgatgcactgcctgggcgccgagtacctggtttctgccgacggcgcccctaggcaaagggagtggcgaccccagatttataggaaatgcacagatacggcatggttattcctgttctttctcttttggactggtttggtgtttatcatgggctactcggtggtggctggagccgcgggaagactcctctttggctatgacagctttggcaacatgtgtggcaagaagaactcccccgtggaaggggcccctctttcagggcaggacatgaccctaaaaaaacacgtgttctttatgaattcctgcaacctggaagtcaaaggtacgcagctcaaccgcatggccctctgtgtatccaactgccctgaagagcagcttgactccctggaagaggtccagttctttgcaaacaccagtgggtccttcctgtgtggttatagtttgaattccttcaactatacccacagtccaaaagcagactcactgtgtcccaggctaccagttcctccaagcaagtcatttcccttatttaaccgatgtgtccctcaaacacctgagtgctactccctatttgcatctgttttgataaatgatgttgacaccctccaccgaattctaagtggaatcatgtcgggaagagatacaatccttggcctgtgtatcctcgcattagccttgtctttggccatgatgttgaccgttcagattcatacaccacccttctggttcacattttcatttcattggttattttgggattgttgtttagtctgcggtgttttatggtggctgtattatgactataccaacgacctcagcatagaattggacacagaacagggaaaatatgaagtgcgtgctggggtatgctatcgtaatccacagggcatcacggcagatgctgctcgtcttgatattttgttctcagaaagagaataaaattgacaagttgagcttttccaaatcaccaaataaagccaatcagcagttggctcccttcctgggctggttccaagccaactgggtgggacgatttggccatcctcattgttcttcgtgggtcctctgggtggctgtgctgctgagccttgggaactgcagggagctgcccaggttatgggaaggcggccaagtggaatataagcccctttcgggcattccggtaacatgtgggtcgtaccatttaattggcctcatctggactagtgaattcatccttgcgtgccagcaaatgactatatgctggggcagtggttacttgttatttcaacagaagtaaaaaatgatcctccgtgatcatcccagccgtttcgtctcgtccccattctcttcttctaccatccaaggaaccattgtgaaagggtcatttttaatctctgtggtgaggattccgagaatcattgtcatgtacatggcaacaacgcagctgacaagatacagcatcggtgcattcgtaccaggtacctgttccggatgactgcttacggctgttcctggtgtctggacaaaatacctcgctccatctcaagccagaatgcatatactacaatcggcctattacatgggacagatttcgtgtacatcagcaaaagatgcattcaaaatcttgtccaagaactcaagtcactttacatctattaatctgctttggagacttcataatttttctaggaaaggtgttagtgctgtgtttcactgttttttggaggactcatggcttttaactacaatcgggcatttccaggtgtggggcagtccctctgttattggtagctttttttggcctacttagttagcccatagtttttttatctgtgtttgaaactgtgctggatgcacttttcctgtgttttgctgttgatctggaaacaaatgatggatcgtcagaaaagccctactttatggatcaagaatttctgagtttcgtaaaaaggagcaacaaattaaacaatgcaagggccacagcagggacaagcactccattaaggaatgaggaggggaacagaactcccaggccattgtgcagatagatacccatttaggtatctgtacctgggaaaacatttccttgctaagaggccatttacagaatagaagatgagtatccactagagataagtttgtgaatttttttttctcaaaagacctaataaaaccctattcatcactcattgtactttgtcattattgttcgaaccaggataacaatactggaactatattagtttacctttttttgtacaaattaggacagaaaaactcttctaaaaccatgtttatatgcatcaacttacaaagtacactatgtaagaactgaggtaag

SEQ ID NO: 107 - DNA, 821 bp, Homo sapiens
  misc_feature: Incyte ID No: LG:451682.1:2000FEB18
cccatctcgccgccgccgcgatgtctcgccgctatgacagtcgcacgacgatcttctcgccggaggggcgtctctaccaggtggagtacgcgatggaggcgatcggcaacgccgggtcagccctcgggatcctggcggccgacggcgtagtcctggtcggcgagaagaaggtgacctccaagctcctccagacctcccgctccgccgagaagatgtacaagatcgactcccacctggcgtgcgctgtggcagggatcatgtccgacgccaacatcctcatcaacaccgcccgcctccacgcccagcgctacgcgctctcctaccaggagcccatccccgtcgagcagctcgtccagtccctctgcgacaccaagcagggttacacccagtttggtggcctccgcccctttggggtctccttcctattcgccggttgggacaagcaccacggtttccagctctacatgagcgacccatctggcaactacggcgggtggaaggccgccgctgttggggccaacagccaggccgcgcagtccatgctcaagcaggactacaaggacgccttgacccgcgaggaggccgtcggtctcgcgctcaaggtcctcagcaagaccatggactccaccagcttgactgccgagaagctggagctggccgaggtatttctgcagcccgacaccggggaggtacagtaccaggtgtgctctcctgaggcgctggggaagctgcttgcaaactccggcctgacacagccaacacccgaggcataatgtactggtttgcagtggcatgtgatgccttctactgctcttagacat

SEQ ID NO: 108 - DNA, 435 bp, Homo sapiens
  misc_feature: Incyte ID No: LG:1077283.1:2000FEB18
cgctgtctcttttcgccgcttgctgcagacatggtcaaccccaccgtgttcttcgacatcacggctgatggcgagcctttgggtcgcggtctggcttcggaagtggttggcagacaaagttccaaagacagcagaaaactttcgtgctctgagcactggggagaaaggatttggctataacgggttcctgctttcacagaattattccaggattcatgtgccagggtggtgacttcacacgccataatggcactggtggcaagtccatctacggagcagaaatttgcaggatgagaacttcatcctgaagcatacaggtcctggcatcttgtccatggcaaatgctggaccaaacacaaatggttcccagttttttatctgcactgccaagactgagtggctggatggcaagcatgtggtctttgggaaggtgaa

SEQ ID NO: 109 - DNA, 1430 bp, Homo sapiens
  misc_feature: Incyte ID No: LG:481436.5:2000FEB18
ggcagattttctaaacatagaaagggagttcacatgctacatggtcaaaaataaaactgatacatgtccatttcagtattcaataaatatttgtcagatgagtgaatgagagaatcagagtcatgatttcctgtctctagacctttaagtcaccaaacattgaagtgataatggtgttgctaatgtaattgaaaataaaatcgaaggagcaagctatggaggggaacagggatgaagctgagaaatgtgtcgacatcgtccaggaggctctgaatgctggcaaccgcgagaaggcccagcgtttcctgcagaaggccgagaagctctacccactgcccttggcctgcgcataaacaaatatcaaaattactatgaaagtacttggagttacgaaagatagtggtgatgaagatttgaaaaaagcttatagaaagcttgctttgaagtttcatccagacaaaaaccatgcacctggagcaacagatgcttttaaaaagattggaaatgcttatgctgttttaagtaatccagaaaagcgaaaacagtatgacctcacgggcaatgaagaacaagcatgtaaccaccaaaacaatggcagatttaatttccatagaggttgtgaagctgatataactccagaagacttgtttaatatattttttgggggtggatttccttcaggtagtgtacattctttttcaaatggaagagctggttatagccaacaacatcagcatcgacatagtggacatgaaagagaagaggaaagaggagatggaggtttttctgtgtttatccagctgatgcccataattgtattgatcctcgtgtcattattaagccagttgatggtctctaatcctccttattccttatatcccagatctggaactgggcaaactattaaaatgcaaacagaaaacttgggtgttgtttattatgtcaacaaggacttcaaaaatgaatataaaggaatgttattacaaaaggtagaaaagagtgtggaggaagattatgtgactaatattcgaaataactgctggaaagaaagacaacaaaaaacagatatgcagtatgcagcaaaagtataccgtgatgatcgactccgaaggaaggcagatgccttgagcatggacaactgtaaagaattagagcggcttaccagtctttataaaggaggatgaactggaatttttatttataccttttagcgtactctttattttttctgtaagtaagtttggtttcatcatgagggatgaaggaaaagatttgatactgaaaactaaactgaatagttggttcctgaaatcttggactgtttatgacctactggctcctttaaatagtaactgaaaactaaaatggaatattttagttaacgcttctacaagtattttcattttaaaagcttacatgattcctaacta

SEQ ID NO: 110 - DNA, 889 bp, Homo sapiens
  misc_feature: Incyte ID No: LI:793701.1:2000FEB01
  unsure 730, 733-735, 797-798: a, t, c, g, or other
ccgacagcataatgtgaggcaaggtctagctgttcccccccggcatacaagcttatagagcagcctcctttgaagatctccaggtggacttcacagagatgccaaagtgtggaggtgttcgagtgtggatcaaggactggaacgtagcctctttgtgcccatggtggaaaggaccccagactgtcgtcctgatcactcccactgctgtgaacgtagagagaatcctagcctggatccatcacaaccgtgtaaaacctgcagcgcctgaatcctgggaggcaagaccaagtctggacaacccctgcagagtgaccctgaagaagatgacaagccctgctccagtcacacccagaagctgactggtccacgcacagccgaagcatgaggaagctcattgtgagattcatttttcttaaattttggacttatacagtaagggcttcaactgatcttactcaaactggggactgttcccagtgtattcatcaggtcaccgaagtaggacagcaaattaaaacaatctttctgttctatagttattatgaatgtgtggaaacaataaaaaaacttgtttgtataatgccactcagtacaaggtatgtagcccgagaaatgaccgacctgatgcgtgttataacccatctgagccctccgcaaccaccgtttttgaaataagaataagaactggccttttcctaggtgatacaagtaaaataataactagaacagncannnaagaaattcccaagcaaataactttaagatttgatgcttgtgcagccattaatagtaaaaanntagaaataggatgtggttctcttaactgagaaaggagctaaagagtagaaaataaatatgtttgtcatgagtcaggggtttgtaaaaattg

SEQ ID NO: 111 - DNA, 1106 bp, Homo sapiens
  misc_feature: Incyte ID No: LI:373637.1:2000FEB01
  unsure 974: a, t, c, g, or other
gccatccagcatggtggactactacgaggtgctggacgtgccccggcaggcctcatccgaggccatcaagaaggcgtaccgcaagctggcgctcaagtggcaccccgacaaaaaccctgagaacaaggaggaagcggagaggagattcaagcaggtggccgaggcctacgaggtgttgtcggacgccaagaaacgcgatatctatgaccgctatggcgaggcgggggcggagggcggctgcacaggcggcaggcccttcgaggaccccttcgagtacgtcttcagcttccgcgacccagccgacgtcttcagggagttcttcggcggccaggacccattctcctttgacctcttgggaaacccgctggagaatattttgggggggtcagaggaactgctggggaagcagaagcagagcgtctgcaccccttttctctgccttcagtgaatttccagcttttgggggtgttttttcttcttttgatacaggatttcgttcctttggctccctgggaagtgggggcctttcttccttctgcatgtcctacggtagtgatgggacaggcagcttcaagtccatgtcgacttccactgaaatagttgatggtaaaaaaatcaccaccaagagaatcattgagaatggccaagaaagggtggaagtggaggaagatggagagttgagttaaagtccttcataataaatagcaaagagcagttactccgcattgacaccaagtaattccagtccacatttgactttaagcacatctggaggaatagcggactttttttaggattgaaagtgaactttactttcagaacagctgtacccaagaatttataaacacttcatgccaacacctgttcttatcgttgggactacacggataggacctctgtttgtctttcaatcgttgtaaaatatctgtatgcaatttgctatttattaaacttaagcctgaggcagacaatgnttatttgctagtggtaggacagaatgttcagttcagcactttgagcattacctttttccgttgggaaagtgtgagccaggtggtttgctctaaatcatttgactttattgtttgtgtgtagtggtgaaatct

SEQ ID NO: 112 - DNA, 461 bp, Homo sapiens
  misc_feature: Incyte ID No: LG:239368.2:2000MAY19
tcgactccgacctcgtgatctgccccctcggcctcccaatgctggatacggcatgagcacacgcccagcccctgcaagcagtttctttaactctgttgggatgccattcgtgggcaaagctagatttgggacaagttgcccagctctgctaggaagagtcagtcctcagggggaagtttcttttcacctccgggatccccagggcttcctgggttgactcaggacttcatacgcagcctggatctccaggaagtgcctctgtgcctcctctgtctggtccaggttgtggtctgggtgccagaccttcactagctcctggtaactccgatgtatttcttcatttgttgccccttctgagaggcccaaaacctggtaagccagctgacgcttctcatcctgaaaactgtgaacaaactcatagagcttcgcccactcctgaaagcagctgctgttgaagccag

SEQ ID NO: 113 - DNA, 1450 bp, Homo sapiens
  misc_feature: Incyte ID No: LI:053826.1:2000MAY01
gaattccccccccccccccctcacttggtgtgtctatatgtctggcagacattatcagcacattctctgttgttacctgtgattcattttttcttcactctccaggtgaatttcaattgctgaaaatttcccactgaaaatatgcagtaatatattttgtggttcagacatttggggcaaatggttcacattcattttagggttagtggtcatgctgtttatttttctctgctatacaaagttcctcttaggggtctgcctcatgacactaaaaaatgaatagagattctactgtaggttatctcctaggcttgagttcaacatttgtttggatttttgaagaaagtcaaatcaagcaatgctcccaaatgatgtctttgtaaattcataccctctggccctattttttttcatagaccctaactctacctttctgctttaaagcaaagtaaactcggtggcctcttcttctccacccctcaaaatgatagcaatctctgccgtcagcagtgcactcctgttctcccttctctgtgaagcaagtaccgtcgtcctactcaattccactgactcatccccgccaaccaataatttcactgatattgaagcagctctgaaagcacaattagattcagcggatatccccaaagccaggcggaagcgctacatttcgcagaatgacatgatcgccattcttgattatcataatccagttccgggccaaggggtcccccccggaggcaatattgcatattttggttggggttgaaatcctgtgccaatctcggcaaaggcttgggcggctacttgcatttgggaccatggaccttcttacttactgagatttttgggccaaaatctatctgtacgcactggaaggtaggaaatatcgctctattctccagttggtcaagccatggtatgatgaagtgaaagattatgcttttccatatccccaggattgcaaccccagatgtcctatgagatgttttggtcccatgtgcacacattatacgcagatggtttgggccacttccaatcggataggatgcgcaattcatacttgccaaaacatgaatgtttggggatctgtgtggcgacgtgcagtttacttggtatgcaactatgccccaaagggcaattggattggagaagcaccatataaagtaggggtaccatgttcatcttgtcctccaagttatgggggatcttgtactgacaatctgtgttttccaggagttacgtcaaactacctgtactggtttaaataagtttaccttttcctccaggaaatataatgatttctgggaacatgggcatgtatatatatatatggagagagaattttgcacatattatacatattttgtgctaatcttgttttcctcttagtattcctttgtataaattagtgtttgtctagcatgtttgtttaatcctttgggaattc

SEQ ID NO: 114 - DNA, 793 bp, Homo sapiens
  misc_feature: Incyte ID No: LI:449393.1:2000MAY01
cagccatgtcgctccgcgtgctgaaccctaacgccgaggtgctcaacaagtcggcagcgctgcacatgaacatcaacgccgccaagggcctccaggacgtgctcaagaccaacctcggccccaagggcaccatcaagatgcttgtgggtggagctggtgacctgaagctgacgaaggatgggaacaccctcttgaaggaaatgcaaattcagaacccaactgcaatcatgattgcgaggacggctgtggcacaggatgacacaagtggtgatggcacaacctccactgtgctatttatcggggagctaatgaagcagtctgagcggtgcatcgatgaaggaactcatccaagattcttggttgatggttttgatgttgctaagagagcgtgtcttgattttctcgataagttcaagacgccagtcgttactggtgaagaacctgacagagataccttaaaaatggtagcaagaacaacacttaggacaaagttgtatgaagggttggctgatcagttgactgatattgttgtgaatgcagttctgtgcattcgcaaaccagatgaaccaattgatctatttatggtggaaataatgcacatgcgccacaaatttgatgttgacacccgtctggttgagggtctggtcctggaccacggttctcgtcaccctgacatgaagcgcagggcagagaattgttacatcttgacctgcaatgtctcattagaatatgagaaaagtgaaatcaatgcaggatttttttactcaaacgcagaacaaaaaaaaaaaaaagg

SEQ ID NO: 115 - DNA, 2494 bp, Homo sapiens
  misc_feature: Incyte ID No: LI:1071427.96:2000MAY01
atgaaagtcaggcttttattgagatgagacaagagaagatgcaatggcaatggttgaccattgtttgaaaaaagccctttggtttcaggggagatgtgtgaaggttgacctgtctgagaaatataaaaaactggttctgaggattccaaacagaggcattgatttactgaaaaaagataaatcccgaaaaagatcttactctccagatggcaaagaatctccaagtgataagaaatccaaaactgatggttcccagaagactgagagttcaaccgaaggtaaagaacaagaagagaagtccggtgaagatggtgagaaagacacaaaggatgaccagacagagcaggaacctaatatgcttcttgaatctgaagatgagctacttgtagatgaagaagaagcagcagcactgctagaaagtggcagttcagtgggagacgagaccgatcttgctaatttaggtgatgtggcttctgatgggaaaaaggaaccatcagataaagctgtgaaaaaagatggaagtgcttcagcagcagcaaagaaaaagcttaaaaagcgtcgttttccagggagtatggaaggttttgtcactctagatgaggttggtgatgaggaagattcggaacttcagaaacttcgtaaatcgggcatggcatttaaatctggtgacaaaaatgatgatggtttggttgaaattaaggtggacaagatcgaggaacttgatcaagaaaacgaagcagcgttggaaaatggaattaaaaatgaggaaaacacagaaccaggtgctgaatcttctgagaacgctgatgatcccaacaaagatacaagtgaaaacgcagatggtcaaagtgatgagaacaaggacgactatacaatcccagatgagtatagaattggaccatatcagcccaatgttcctgttggtatagactatgtgatacctaaaacagggttttactgtaagctgtgttcactcttttatacaaatgaagaagttgcaaagaatactcattgcagcagccttcctcattatcagaaattaaagaaatttctgaataaattggcagaagaacgcagacagaagaaggaaacttaagatgtgcaaggagatttaatgatttcaaagaaaatgatggttctttgtttttaatgttaaccttttttaaatacaatactgatagaagaaaactattgtactcttttgttttagtggagaaataatagatgtctgttcatgtgttaagtgttatagcaaaaaaaatacacatatggttaagttaatgaatagtttttgttttatcagaatggcaacagacagaagtactttgtagagattgacttcctaagctacttaagacaacttgcaccactaagaaaaaaatgtagaaccatttggaaaaatgaaatttagtagttccaagtttcaaagaaatgtcaacattttattccattcaataaagaacaaaaccaatagtgtttttattactttcatctgaaacattccatgttttaatctgagccttgcagactttcatttggagtttgaacccgttttggttgcatttcatttttggagaacttaattaacgtgagattggcaattgaaatgcaggtgcagttttctgttaatgtcatgctgttgtttaggtaataagaaatattaagtaattggctttagattttgtaatttttttccctgagttcctgctagatttcgtattctagtagtcaatgtattttcagtgaaatgcaaaaatattcccattatctttgaccagtattaatttttgagatcttactgcttgtcacttgaatcccgtgattgtcatacatctctggtataagcaacatttgatttttgaagtgtgtagaccatctcttcatattttcaagatgtaattttacatttctgcatttttaaaacagtttggccataatcctagatgcacgcttctaattcatgtacctgcacatgtgacctttgtgaacagaaatttgcatgtataatttgtgtttacttgtaactttctggttatatactgcttatatctgtggattcaagttactgaagtgaataccaataaaaagaaaaccctaggccatgttaattggttatacatgtttggaatgttaaccaacgtatttgtcagttgtggtttttattcgctcttaaactttgtgcatgctttaacaatttattacttttaaatctagagtgaattctaaagactgccgctaaagatctgagttttaaaaatgttgttgctggtggatttcttgttcctgttacataactaaaagtgaggccatttgtggtttttaaaaaccttatgaattaaaaatgctacaggtgaacaaacagaagcttatgtttagagagattgatgacttaacagtacaattggaagtaatacggatgagcaagaattagttctgcagcttttcaaaataattacgtagagactcttggtatattggattatctgttgtaaac

SEQ ID NO: 116 - DNA, 957 bp, Homo sapiens
  misc_feature: Incyte ID No: LI:336338.8:2000MAY01
  unsure 684, 708, 743: a, t, c, g, or other
gcatcttataatatgtggcagtttacaactgctttgaccagaaaactgatgtgatatcagtgttactgcccagatatgagagttggatgcagagacatctgttcaaccgagttaggcacatgactacttcttcttgtgttgaatttaattcttcttcttgtgttgaatttaattgccgttctaaagaggtttgaaaattaaactattgttcaatattcgaaggaaagattcttgcataagcatggaaacaaacaaaacagaatgttacataagtataacaaatacttttaataagtctaaaattaaaattctaattgataagacaatattgtgtcacagtttaatatgaagcatcttttcctttgtgttacttaaaatgatggtgcatcttaaatcttgtgtcttagattcaatgaaatatggtataaatgactgtatactctctgctctaggtatctcaaagaagacaaatttcttgcttgtgttattaattgatttctaatttattctttttctaatctttttttttttttcacaaatggataccaattacatttaccatgggactgcaatgtctctcctctccttgaaaaacaatgcggttgactgaaatcacttggggtggaccaaatttcctcctgttgactactcctgaatgatctcttccaattccccaaatctgcntctctggccaatcacaaccttctnccatgtgtgtacatcatgctgctctcgtcttcaantccccttctctcttgctgacttctggaaaagcaacggaagagtcctgggcggaaggaggcttctgtatgcttgtgaaaaagaacaatctgtgccaacggaaggttcttcaacaactttgctgcaaaacatgtacatttcaaggctgagcagccatcttagatttctttgttcctgtagacttatagattattccatattattaaaaagaaaaaa

SEQ ID NO: 117 - DNA, 1269 bp, Homo sapiens
  misc_feature: Incyte ID No: LG:345527.1:2000FEB18
cagggagttaaaacgattcaatgctgataacaaacttcttttgactggtactcccttgcaaaacaatttatcagaactttggtcattgctaaactttttgttgccagatgtatttgatgacttgaaaagctttgagtcttggtttgacatcactagtctttctgaaactgctgaagatattattgctaaagaaagagaacagaatgtattgcatatgctgcaccagattttaacacctttcttattgagaagactgaagtctgatgttgctcttgaagttcctcctaaacgagaagtagtcgtttatgctccactttcaaagaagcaggagatcttttatacagccattgtgaaccgtacaattgcaaacatgtttggatccagtgagaaagaaacaattgagttaagtcctactggtcgaccaaaacgacgaactagaaaatcaataaattacagcaaaatagatgatttccctaatgaattggaaaaactgatcagtcaaatacagccagaggtggaccgagaaagagctgttgtggaagtgaatatccctgtagaatctgaagttaatctgaagctgcagaatataatgatgctacttcgtaaatgttgtaatcatccatatttgattgaatatcctatagaccctgttacacaagaatttaagatcgatgaagaattggtaacaaattctgggaagttcttgattttggatcgaatgctgccagaactaaaaaaaagaggtcacaaggtgctgcttttttcacaaatgacaagcatgttggacattttgatggattactgccatctcagagatttcaacttcagcaggctgatgggtccatgtcttactcagagagagaaaaaaacatgcacagcttcaacacggatccagaggtgtttatcttcttagtgagtacacgagctggtggcctgggcattaatctgactgcagcagatacagttatcatttatgatagtgattggaacccccagtcggatcttcaggcccaggatagatgtcatagaattggtcagacaaagccagttgttgtttatcgccttgttacagcaaatactatcgatcagaaaattgtggaaagagcagctgctaaaaggaaactggaaaagttgatcatccataaaaatcatttcaaaggtggtcagtctggattaaatctgtctaagaatttcttagatcctaaggaattaatggattattaaaatctagagattatgaaagggaaataaaaggatcagagagaggtc

SEQ ID NO: 118 - DNA, 512 bp, Homo sapiens
  misc_feature: Incyte ID No: LG:1089383.1:2000FEB18
cctgtagccactgaggttcacaggctctgtttgaggtgttgtgttagattgtgctgggttggttttgctgcttattgagtgatgaagagcaacatattagctactgagatattttgcagaaaaaggaagagatgtcttcagctcaaatgctatcaaactggtgaaataaacagcgttgttgctcacacaaagcctgtttggtagtctcttcacatggacgcgtgtgacatttggtgctgaagacccgggacaggaggactccttcaggagacgggtcccctgtccttgccctcactccgtgaggagatccacctacgacctcaggtcctcagaccaaccagcccaaggaacatctcatgaatttcaaatcggattcccaactatatgaagacaccctagctggacgatcagttcttattaagaacctgacccctcaaactctacaacctcgatggactggaccctacttagtcatctatagtaccccaactgccgtccgcctgcaggatcct

SEQ ID NO: 119 - DNA, 530 bp, Homo sapiens
  misc_feature: Incyte ID No: LG:1092522.1:2000FEB18
ggctaatgacttattacttgctgtttatatttattttggactatggaaatgatgctagacaaaaagcaaagttgagtgattttcttatttaagttcaaagtgggtcgtaaaacagcagagacaacttgcaatatcaacaatgcatttggcccaggaactgctaatgaacgtacagtgcagtggtggttcaagacacttttcaaaggagatgagaaccttgaagatgaggagcatagtggccaaaccactggaagttgacaatgaccaactgagagcaatcagcaaagctgatcctcttaaggctacttgagatgttgccgaagaactcaatgtggaccattctacagtcatttggcatttgaagcaaattggaagagtgaaaaagctcgataagtgggtgcctcatgagctgagtgaaaatttaaaaaatagtcattttgaagtgtccttatcccttattttttgcaacaacaaaccatttcttggtcagattgtgatgtgcgagaaaaagtggattttatacaacaact

SEQ ID NO: 120 - DNA, 671 bp, Homo sapiens
  misc_feature: Incyte ID No: LG:1093216.1:2000FEB18
  unsure 436, 454, 499, 554: a, t, c, g, or other
aactgttttcctttgaggaatattgatgatcccactgcttgagtaatggaaaccagcttgcagctgatagttattttttgtcttttttcctgttctatccactgtcctaggtttggaatttcagctgggcagcttcgatcccaccacctgtagccactgaggttcacaggctctgtttgaggtgttgtgttagattgtgctgggttggttttgctgcttattgagtgatgaagagcaacatattagctactgagatattttgcagaaaaaggaagagatgtcttcagctcaaatgctatcaaacttgtgaaataaacagcgttgttgctcacacaaagcctgtttggtagtctcttcacatggacgcgtgtgacatttggtgctgaagacccgggacaggaggactccttcaggagacgggtcccctgtccttgcnctcactccgtgaggaganccacctacgacctcgggtcctcagaccaaccagcccaaggaacanctcatgaatttcaaatcggattcccaactatatgaagacaccctagctggacgancagttcttattaagaacctgacccctcaaactctacaacctcgatggactggaccctacttagtcatctatagtaccccaactgccgtccgcctgcaggatcctccccactgggttc

SEQ ID NO: 121 - DNA, 257 bp, Homo sapiens
  misc_feature: Incyte ID No: LI:270318.3:2000FEB01
ttctttgagactatttaaaaactggtacaacaggtctctacaacgccaagatctaactaagctttaaaagggatagctgggagtatggccaccctgctccacgatgcggtaatgaatccagcagaagtggtgaagcagcgcttgcagatgtacaactcgcagcaccggtcagcaatcagctgcatccggacggtgtggaggaccgaggggttgggggccttctacggagctacaccacgcagctgaccatgaacatc

SEQ ID NO: 122 - DNA, 1353 bp, Homo sapiens
  misc_feature: Incyte ID No: LI:335671.2:2000FEB01
gggaagtgaatatccctgtagaatctgaagttaatctgaagctgcagaatataatgatgctacttcgtaaatgttgtaatcatccatatttgattgaatatcctatagaccctgttacacaagaatttaagatcgatgaagaattggtaacaaattctgggaagttcttgattttggatcgaatgctgccagaactaaaaaaaagaggtcacaaggtgctgcttttttcacaaatgacaagcatgttggacattttgatggattactgccatctcagagatttcaacttcagcaggcttgatgggtccatgtcttactcagagagagaaaaaaacatgcacagcttcaacacggatccagaggtgtttatctcttagtgagtacacgagctggtggcctgggcattaatctgactgcagcagatacagttatcatttatgatagtgattggaacccccagtcggatcttcaggcccaggatagatgtcatagaattggtcagacaaagccagttgttgtttatcgccttgttacagcaaatactatcgatcagaaaattgtggaaagagcagctgctaaaaggaaactggaaaagttgatcatccataaaaatcatttcaaaggtggtcagtctggattaaatctgtctaagaatttcttagatcctaaggaattaatggaattattaaaatctagagattatgaaagggaaataaaaggatcaagagagaaggtcattagtgataaagatctagagttgttgttagatcgaagtgatcttattgatcaaatgaatgcttcaggaccaattaaagagaagatggggatattcaagatattagaaaattctgaagattccagtcctgaatgtttgttttaaagtggagctcaagaatagcttttaaaagttcttatttacatctagtgatttccctgtattgggtttgaaatactgattgtccacttcaccttttttatcatatcagttgacatgtaactagtaccatgcgtacttaaatagatggtaattttctgagccttaccaagaacaaagaagtatccatattaagtttagattttcagttaatttttgagactgagtagtattcttggatacaggctgatgtgtacttaaccacttccagatttatacagtcttcctgtggaagtttagtaaatgtctttttccctcctttcttctagtaatgcagttcatgggctttaggtacttcagttatgaagtaggcttttcatggggagagattgggattatgctctctgttgtttaagaaactgtttgattttagagtctatttctatgagatagtttaccaaataaatgttccttataag

SEQ ID NO: 123 - DNA, 671 bp, Homo sapiens
  misc_feature: Incyte ID No: LI:793758.1:2000FEB01
  unsure 554: a, t, c, g, or other
aactgttttcctttgaggaatattgatgatcccactgcttgagtaatggaaaccagcttgcagctgatagttattttttgtcttttttcctgttctatccactgtcctaggtttggaatttcagctgggcagcttcgatcccaccacctgtagccactgaggttcacaggctctgtttgaggtgttgtgttagattgtgctgggttggttttgctgcttattgagtgatgaagagcaacatattagctactgagatattttgcagaaaaaggaagagatgtcttcagctcaaatgctatcaaacttgtgaaataaacagcgttgttgctcacacaaagcctgtttggtagtctcttcacatggacgcgtgtgacatttggtgctgaagacccgggacaggaggactccttcaggagacgggtcccctgtccttgccctcactccgtgaggagatccacctacgacctcgggtcctcagaccaaccagcccaaggaacatctcatgaattttaaatcggattcccaactatatgaagacaccctagctggacgancagttcttattaagaacctgacccctcaaactctacaacctcgatggactggaccctacttagtcatctatagtaccccaactgccgtccgcctgcaggatcctccccactgggttc

SEQ ID NO: 124 - DNA, 512 bp, Homo sapiens
  misc_feature: Incyte ID No: LI:803718.1:2000FEB01
  unsure 290: a, t, c, g, or other
cctgtagccactgaggttcacaggctctgtttgaggtgttgtgttagattgtgctgggttggttttgctgcttattgagtgatgaagagcaacatattagctactgagatattttgcagaaaaaggaagagatgtcttcagctcaaatgctatcaaactggtgaaataaacagcgttgttgctcacacaaagcctgtttggtagtctcttcacatggacgcgtgtgacatttggtgctgaagacccgggacaggaggactccttcaggagacgggtcccctgtccttgcnctcactccgtgaggagatccacctacgacctcaggtcctcagaccaaccagcccaaggaacatctcatgaatttcaaatcggattcccaactatatgaagacaccctagctggacgatcagttcttattaagaacctgacccctcaaactctacaacctcgatggactggaccctacttagtcatctatagtaccccaactgccgtccgcctgcaggatcct

SEQ ID NO: 125 - DNA, 782 bp, Homo sapiens
  misc_feature: Incyte ID No: LI:412179.1:2000FEB01
aggcagcatgacaacatgatggacagagcacggattttctgagggatacagccaggtcccacccctaattagcttcttgagctcagctaagttcttaaaacttctctgagcccttgattttctccatctgcatgatggattattttataggttgaccactcgtcctggtttgcctgagactgaagggcatcctgggacacagaacttccagtgctaaaacccagaaaatcccaggcatatcaagatgagttggtcacttagaggacagatgaattgaaatgacatatagaaatggactcacactgtgccctgcatctaatagctgctctataaatgtagtcacacaaaaacgtgctcctcacatggtaaaagaaaaataaaatgaaacaaataggtgagtgcaaaataattgcagtttttgaattgttggaatttgctgtataatactggaatacattcttaaataaatgtggttatgttatacatcattttaatggacatttctcgctttatgtttgctaatgacttatcacttgctgtttattttatgtgtatttaaactatagaaatgatgttagacataaagcaaattcaagtgattttcttattcgagttcaaaatgggtcgtaaaatagcagagacaactcgtaacatcgacaatgcatttggcccaggactgctaacgaatgtacagtgcagtggcagttcaaggagacaaggagcgtagtggtgggccattggaagttgacaatgacaaactaagagcaatcattgaagctgat

SEQ ID NO: 126 - DNA, 1937 bp, Homo sapiens
  misc_feature: Incyte ID No: LI:815679.1:2000FEB01
  unsure 635: a, t, c, g, or other
ccaggtctacatgtataaaattttttaacagtaacaaaatactttgctttctttttatattaagtcttcacaatctaatgtgtatttgacacttctcgcacatttcagaatgatggcagcagcccatatggggggcccgcccatgatgccaaagatgggccctcctcctcctgggatgatgccagtgggacctgctcttggaatgaggccgcccatgggaggccacatgcctgtgatgcctgggtgcccaatgataagacctcctgcccgtctcatgatggtgcccagtcagcccagaatgacttgaccagacagataaggatagaggggaggcctcattgcatcagtgttgttttgttgttgttattgttgtgttttttttgtttgtaatgttttgttttgtttttgagacagagtcttcctctgtcgcctaggctggagggcagtggcgtgatctcggctcactggaacctccgcctcccgggttcaagcgattcccctgcctcggcctcctgagtagtgtgggactgcaggcgtattcaccatgccccggctaattttttttatttagtggagacggggtttcaccgtgttggccagatggtctcgatctcctgacctcgtgactcgctcgntcagcctctgaaggtgctgggattgcaggtgtgaagccactgcgcctggcctatatgaattttatatttacctgctcccttcaccaggagatcatgctgctgtgatatcgagttttcttaacagcataaggaagacttgccctcttgccctatcaaagagaatagttttggaggggagaagtgggaccaaaaaagatgcagttttcatttgtattgggaaatgtgaaaataaaattgccaactgctttagttaaaaacaaaaaaaaagaaaaggaaacaagatgtggggctgccatatgcaataccgtggattctacagatcttctactctggaggcaaatattatcttcgctgaagccagaccaacctgacacaaaggccttttgtttttttaatgtgactgtgttttattttagaatgtgtaattcactttagaagggcaaagtacctgtctggggaagactatttaatttcctgcatttatttagaatgctggctgatgttattatgaagggaaacagctctaacaactgagtgtcccccacatagacacagctcatgagttcacggggcaaaggaattgaacagcagcctcctaatagccggccttctttgtgatgtggaaataattatcagcatgtaaaagactatatatatattcaacaattctgaccccctgcaaaattcaaatctacaactgatttgcttcctgggctcctgaaaacaactttgtcaaaattgttcagaaatataatcagccaatcgttgccccttggggacgcaggataaagcaagtcatccatgaccaatgtggagtcggccgtgcacaatgacatgcagacttgcaggacatcgagtccctgctatggtccctccccagtcaggcccccattgcctgggctgcagccagcagcattcaggcacaagtgcattcaacaaatacttatttaattgtattggtggttagagggttgtgattgattaaggtacattaatggatccatgtcctccctgtatccaagactctgccatttgtctctgcagttcctcccactgaagaatcggagtatatttctccagtccctaatgttgggttttgaattgtgtctagctttggccactggaatattaatctgtatgaccaaaaacttggaaagtgtgaattcatttgtgctcgctcactcctgctatcaccatgagaacaagcctaggccaggctgctgcttccagcagaagataagagacaccaagaacaaagtcgagcttcccagacatgctcatgctagactgaccaatcctcag

SEQ ID NO: 127 - DNA, 504 bp, Homo sapiens
  misc_feature: Incyte ID No: LI:481361.3:2000FEB01
ggagccctggggatatgatgccagccagggaaggtgagaatgtggtatgtgtgtgtgtgtagtgccccctgcaggagatgaagccccagagaaacacagcggaccttctgccaaaactcaagtccatggccctggctgacagagctgtgtttgaaaagggcatgaaagcttttgtgtcatatgtccaagcttatgcaaagcatgaatgcaacctgattttcagattaaaggatcttgattttgccagccttgctcgaggttttgccctgctgaggatgcccaagatgccagaattgagagggaagcagtttccagattttgtgcccgtggacgttaataccgacacgattccatttaaagataaaatcagagaaaagcagaggcagaaactcctggagcaacaaagaagagagaaaacagaaaatgaagggagaagaaaattcataaaaaataaagcttggtcaaagcagaaggccaaaaaagaaaagaagaaaaaaatgaatg

SEQ ID NO: 128 - DNA, 971 bp, Homo sapiens
  misc_feature: Incyte ID No: LG:247388.1:2000MAY19
  unsure 46: a, t, c, g, or other
aacaggaaacaattattgaagtagagctgactaatatccagaaganatactatcgggctattttggagaagaatttctccttcctttccaaaggggcaggtcataccaacatgcctaatctacttaacacaatgatggagttgcgcaagtgctgcaaccacccatatctcatcaatggtgctgaagaaaaaatcctaacagaattccgtgaagcttgccatattatacctcatgacctttcacctgcaggccatggttcgttcagccggcaaactggttcttattgacaagttgcttccaaagcttaaagctggtggccataaagttctgatcttctctcagatggtacgctgcctagacatcctagaggattatttaatccagaggaggtacttatatgaacgtattgatgggcgagttagaggcaaccttcgacaggctgccattgaccgcttcagcaagcctgactcagaccgctttgtcttcttactgtgtacccgggctggtggacttggtattaatcttacagctgctgatacctgcatcatctttgattcagactggaatccacaaaatgacctgcaggcccaggcacgatgtcatcgaattgggcagagcaaagctgtgaaggtgtaccgcctcatcactcgtaattcctacgagagagagatgtttgataaggccagcctcaagttggggttggataaggctgtgcttcaatccatgagtggtcgggatggcaacattactggaatccaacagttctctaagaaggagattgaagatcttttaagaaaaggagcatatgcagccatcatggaggaagatgatgaaggctccaagttttgtgaagaggacattgaccagatcttgttaagacgaactacaaccatcaccattgaatctgaaggaaaaggttccacctttgctaaggcaagctttgttgcttctgaaaacaggacagatatttc

SEQ ID NO: 129 - DNA, 192 bp, Homo sapiens
  misc_feature: Incyte ID No: LG:255789.10:2000MAY19
aactaaaagaattgacaattttattttcacatttcccaatacaaatgaaaactgcatcttttttggtcccacttctcccctccaaaactattctctttgatagggcaagggggcaagtcttccttatgctgttaagaaaacccagcatcacagcccatgatctcctggtgaagggagcaggtaaatataaag

SEQ ID NO: 130 - DNA, 2002 bp, Homo sapiens
  misc_feature: Incyte ID No: LI:787618.1:2000MAY01
  unsure 635: a, t, c, g, or other
ccaggtctacatgtataaaattttttaacagtaacaaaatactttgctttctttttatattaagtcttcacaatctaatgtgtatttgacacttctcgcacatttcagaatgatggcagcagcccatatgggtggcccgcccatgatgccaaagatgggccctcctcctcctgggatgatgccagtgggacctgctcttggaatgaggccgcccatgggaggccacatgcctgtgatgcctgggtgcccaatgataagacctcctgcccgtctcatgatggtgcccagtcagcccagaatgacttgaccagacagataaggatagaggggaggcctcattgcatcagtgttgttttgttgttgttattgttgtgttttttttgtttgtaatgttttgttttgtttttgagacagagtcttcctctgtcgcctaggctggagggcagtggcgtgatctcggctcactggaacctccgcctcccgggttcaagcgattcccctgcctcggcctcctgagtagtgtgggactgcaggcgtattcaccatgccccggctaattttttttatttagtggagacggggtttcaccgtgttggccagatggtctcgatctcctgacctcgtgactcgctcgntcagcctctgaaggtgctgggattgcaggtgtgaagccactgcggcctggcctataatgaatttataatttaacctgctcccttcacccaggagatcatgctgctgtgatgtcgagttttcttaacagcataaggaagacttgccctcttgccctatcaaagagaatagttttggaggggagaagtgggaccaaaaaagatgcagttttcatttgtattgggaaatgtgaaaataaaattgacaactcttttagttaaaaacaaaaaaaaagaaaaggaaacaagatgtggggctgccatatgcaataccgtggattctacagatcttctactctggaggcaaatattatcttcgctgaagccacgaccaacctgacacacaaggccttttggttttttaaatgtgactgtgttttattttagaatgtgtaattcactttaggaagggcagaagtacctggtctgggggaagactatgttaatttcctgcatgttatttagaatgctggctgatggttatctatgaagggaaacagctctaacaactgagtgtcccccacatagacacagctcatgagttcaaggggcaaaggaattgaacagcagcctcctaatagccggccttctttgtgatgtggaaataattatcagcatgtaaaagtctatatatatattcaacaattctgaccccctgcaaaattcaaatctacaactgatttgcttcctggggctcctgaaaacaactttgtcaaaattcgttcagaaatataatcagccaatcgttgccccttgggaccgcaggataaagcaagtcagccatgaccaatgaggagtcggccgtgcacaattacatgcagacctgcaggacatacgagtccctgctatggtccctccccagtcaggcccccactgcctgggctgcagctagaagcattcaggcacaagtgcattcaacaaatacttatttaattgcattggtggctagagggctgttgttgattaaggtacattaatggatccatttcctccctgtatccaagactctgccatttgtctctgcagttcctccccactgaagaatcgggagtatatttctccagcccctaatgttgcatttagtcacatgtctagctttggccactggaatattaatctacatgaccaaaaacttggaaagtgtgcattcatttgtgctcactcactcctgctatcaccaaaagaacaagcccaggccagactgctgcttccagcagaagataagagacaccaagagcaaagtcaagcttcccagacacgctcatgccagattaaccaatcctcagctagacccatagctccatgaaaataaatgactgttgtattaagcc

SEQ ID NO: 131 - DNA, 8277 bp, Homo sapiens
  misc_feature: Incyte ID No: LI:331610.2:2000MAY01
  unsure 4213, 4217, 4222: a, t, c, g, or other
agcaatgcaagattagatctctaaatgcagcaaaacactgcctgaaaacagaccggcccgcgcagcaagcagacatttcacggtgcgctggggaagcttcaaaatatatctgtgactctgtcttcgttgctcttcatccccatcaatttcatcacgggaggcgagcagcaagtaagaatttcactttcggatctgcctagagacacacctccctgctccctcccccactcgatgtgaagagtattccggagtctccgggcgggagtagatttgcagcacccctaagcgggagcgagggaaaacctactgattctttagctcattatcatctctcccagacgagatttccttcttatcgcctgcctcatcgctcaagtttgagcctcccgaagtccgggcgggagagacgaaacccctggctcacccccagccgcaggaagccaccgccttgctccaagcccctgcagctctgctgcaccgcagcttctcacccagtgcggatgctgtagatcaacaggttcagggaacttgagcagaataaggagagaccaccgggtgccgcagctcgggtgcagagggaaaaaaggacccatagacttgtggctcgcgtcgcgcgcgcacgctgcgccaggggcccaggctggggcgcactccctctctgggtcctccagtccgattgccctgcccccaccttacaggtctgggatgtacctttccatctgttgctgctttcttctatgggcccctgccctcactctcaagaacctcaactactccgtgccggaggagcaaggggccggcacggtgatcgggaacatcggcagggatgctcgactgcagcctgggcttccgcctgcagagcgcggcggcggagggcgcagcaagtcgggtagctaccgggtgctggagaactccgcaccgcacctgctggacgtggacgcagacagcgggctcctttacaccaagcagcgcatcgaccgcgagtccctgtgccgccacaatgccaagtgccagctgtccctcgaggtgttcgccaacgacaaggagatctgcatgatcaaggtagagatccaggacatcaacgacaacgcgccctccttctcctcggaccagatcgaaatggacatctcggagaacgctgctccgggcacccgcttccccctcaccagcgcacatgaccccgacgccggcgagaatgggctccgcacctacctgctcacgcgcgacgatcacggcctctttggactggacgttaagtcacgcggcgacggcaccagagttcccagaactggtcatccagaaggctctggaccgcgagcaacagaatcaccatacgctcgtgctgactgccctggacggtggcgagcctccacgttccgccaccgtacagatcaacgtgaaggtgattgactccaacgacaacagcccggtcttcgaggcgccatcctacttggtggaactgcccgagaacactccgctgggtacagtggtcatcgatctgaacgccaccgacgccgatgaaggtcccaatggtgaagtgctctactctttcagcagctacgtgcctgaccgcgtgcgggagctcttctccatcgaccccaagaccggcctaatccgtgtgaagggcaatctggactatgaggaaaacgggatgctggagattgacgtgcaggcccgagacttggggcctaaccttatcccagcccactgcaaagtcacggtcaagctcatcgaccgcaacgacaatgcgccgtccatcggtttcgtctccgtgcgccagggggcgctgagcgaggccgcccctcccggcaccgtcatcgccctggtgcgggtcactgaccgggactctggcaagaacggacagctgcagtgtcgggtcctaggcggaggagggacgggcggcggcgggggcctgggcgggcccgggggttccgtccccttcaagcttgaggagaactacgacaacttctacacggtggtgactgaccgcccgatggaccgcgagacacaagacgagtacaacgtgaccatcgtggcgcgggacgggggctctcctcccctcaactccaccaagtcgttcgcgatcaagattctagacgagaacgacaacccgcctcggttcaccaaagggctctacgtgcttcaggtgcacgagaacaacatcccgggagagtacctgggctctgtgctcgcccaggatcccgacctgggccaagaacggcaccgtatcctactctatcctgccctcgcacatcggcgacgtgtctatctacacctatgtgtctgtgaatcccacgaacggggccatctacgccctgcgctcctttaacttcgagcagaccaaggcttttgagttcaaggtgcttgctaaggactcgggggcgcccgcgcacttggagagcaacgccacggtgagggtgacagtgctagacgtgaatgacaacgcgccagtgatcgtgctccccacgctgcagaacgacaccgcggagctgcaggtgccgcgcaacgctggcctgggctatctggtgagccactgtgcgcgccctagacagcgacttcggcgtagagcgggcgtctcacctacgaagatcgtggacggcaacgacgaccacctgtttgagatcgacccgtccagcggcgagatccgcacgctgcaccctttctgggaggacgtgacgcccgtggtggagctggtggtgaaggtgaccgaccacggcaagcctaccctgtccgcagtggccaagctcatcatccgctcggtgagcggatcccttcccgagggggtaccacgggtgaatggcgagcagcaccactgggacatgtcgctgccgctcatcgtgactctgagcactatctccatcatcctcctagcggccatgatcaccatcgccgtcaagtgcaagcgcgagaacaaggagatccgcacttacaactgccgcatcgccgagtacagccacccgcagctgggtgggggcaagggcaagaagaagaagatcaacaaaaatgatatcatgctggtgcagagcgaagtggaggagaggaacgccatgaacgtcatgaacgtggtgagcagcccctccctggccacctcccccatgtacttcgactaccagacccgcctgcccctcagctcgccccggtcggaggtgatgtatctcaaaccggcctccaacaacctgactgtccctcaggggcacgcgggctgccacaccagcttcaccggacaagggactaatgcaagcgagacccctgccactcggatgtccataattcagacagacaattttcccgcagagcccaattacatgggcagcaggcagcagtttgttcaaagtatttcagtagctccacgtttaaggacccagaaagagccagcctgagagacagtgggcacggggacagtgatcaggctgacagtgaccaagacactaacaaaggctcctgctgtgacatgtctgttagggaggcactcaagatgaaaactacttcaactaaaagccaaccacttgaacaagaaccagaagagtgtgttaattgcacagatgaatgccgagtgcttggtcattctgacaggtgctggatgccacagttccctgcagccaatcaggctgaaaatgcagattaccgcacaaatctctttgtacctacagttgaagctaatgttgagactgagacttacgaaactgtgaatcccactgggaaaaagactttttgtacatttggaaaagacaagcgagagcacactattctcattgccaacgttaaaccttatttaaaagccaaacgtgccctgagccctctcctccaagaggtcccctcagcatcaagcagcccaaccaaggcgtgcatcgagccttgcacctcaacaaaaggcctcccctggatggcctgtgaaggcaaaacccaggagcccctggctgaagcaagcagtcagtacttgccccactgacagtcaatatctgtcacctagtaagcaaccaagagaccctcccttcatggcttccgatcagatggcaagggtctttgcagatgtgcattccagagccagccgggattccagtgagatgggtgctgttcttgagcagcttgaccaccccaacagggatctgggcagagagtctgtggatgcagaggaagttgtgagagaaattgataagcttttgcaagactgccggggaaacgaccctgtggctgtgagaaagtgaaaaaaganaaanaaaanggcattggcattttcttgtctcttctgttgatttaaaaatgatccctcctggtgataacacattttacagggatgaagaaagaccaatgctgctttaaggcttttagtgaacatctgaagtgcccacaagtatgttctttccactgctgatttctttttcagagataacaatggtttcgttttgaccaaacttgtattaggacagaattaatgatgcttaaagagaaaagaaaaaaagagagaagaaaaaggagagatgaaaaaggaggatgaggagaagaattaccttttgacaatctgttaggaaggtatgcagtgtgagaactgaagtatttctgatcactctcagactgtcctccgtgatttatgctgacttaactgtttacctataaacccccatacaaagccaggggcataatttgtgatctgtggtggatttctagcagtcatcacaggcttctactgaaagtcctgaaaagaccttgcagtagtccaagctacaccaaacattaacacatatttgtgggtaaacatttctgtataaagttacctgacacacatataaacacaaggaacattccatatccatagtccgaaaaccaaaaccaaaaaaaaacctttggtccatttgtaagaccatctccatgtcatattaaaagttaaatgtaaaaagatacagtccattttgtcctgcacacacgtagactaattcacgtcattaaagaagaagaaaacttaaagatttaaaatgcctatttagcattttagtgtccaacaaagatttaaacaatgatgaatatgttttaaatttgacatagaaaagttctaaaaaatagttaccattgagtggtaagattcagagaaaattaacttgattaatatgttttattcatttgtggactactaattatagctctaggaaagtgaaaatgtcttagacatacgctagtcacatgaccatttaaatgtgctaatgtaagaagattcaatgtgtttacatctattgacatattttattgatttattgcagattcagtgcatatgagccaaattgttgagtgtgtaagagctatattgtgtattttattaaattaatatatagttgtgttgcaaaaatatttgggcttatattgtaaatggacaagtgttgccttggtagcctgtccgaacctcctatgagatttatgttttttcctgctttccttttccccatgggagtgtggggaagcagtgcctcagagcaaagtctcttgtttaatgtatagtctaccaagtactacagtacataatctgttcaaaatgtgtttgagtgagctgatggagctaactgaaaggtcaaaaattacatccatcagtcatggttatgtgcaagtccttgtagaagcttttattaaagtcatgctaaatcacaagaattgacatttgtaccaatatctgaaacttcttcatgttttttcaataacatacagcttctgcctgtgtagatattatgccatcagttggttctcaaaagtattttaagtgcttcagatgtgtgttcccattatattttgaaaacatgaaaaatgctttaatgcatgtatgtaccagcagtggttacttgcattgtgtagtgtttttcaagaggtctgggtcttaacaaaatgttttcctttatctcagtgctcttctgcctctttttgttggggtcctttgagaacaatacaccttctattccttcatttggttacacctttcctttgtgacatttagcgagtttcaaacttacttccatatgaggctaagagacctcagatttcaggatttgggaaaaataaaattagcacttgcagaagtagcagcagatgggaaaatgccttgattgacattttctttcagcatttaaaatttttggcattttacagcttcatgacaaacagttttgtgcccataccttagaaaatgtggtgctgagttaaataaaggctgtttgagcactggagcagaaaaatgcattatttgcaaactggtggataattttgtgccttctcttctggccaccaagccagtgtagaaacagcaaaaatgtcataaaaattcttatatttaaaacaaaaacaaaagcaaaaacaaacattgaattacattaagttttgtcattttaaactttaaaaacttctactgaaaatatttccgccaaatgccatcaatattttagactgtacctcgtttgcgaaactgctttgagagggaagagtggacaactcccatcagccttattctcttgagaactatattttggttcctagtaacagcctttccaaagctctactcttggtttttattactcataaatgtttaaattagaaaagaagggaccttgtacatgtgaaacctaattgactctctatattttggacaatttatgtatctgaaatgtgttgtgctctgttatatgatgttatttttgccaggagactacaggttgatttagcttgatagctgaaatttgatggaaaactgatttccatttagtcttaccaagtgttgcttctctcttactagacagatatccacttagtaaaatctaaagcagtatgtaaatgaaaccagcaaagagagtagggtttattttaataaacattcttaattgctaagtaaaccagttgttcaatttattatatgtgtctgaggacattaaaacaccattaagattgtaataattggttgtgcccaatgtgtgagggatttaccttttaggctctctgtcaccagtgatttactagtgttagctgtttaacacattatctgtatttagtagtgattatttatttacaagttggtggtaattcagcaggtcaggagtctaagcttttatagttgaattgaggaaatctcgcttttattcatttagctggcaactgcctttattgcagacctctggtgcttggctttcaaggaagcctatgagatgccaaaatcacacctttagagagcaccttgctctaatagggtgatgcatgagcaaacagtgagatttgaaggggttttaacataactttagaatgtgaaaacaatatcaattcatatctttcaagtactaacccctcaaacaagcccacacatacaaaactatgtgatgtgataccactttgtcttttaggtctttaagtaactgaagttaagcacagaaaaaaaaatcacttcatggaaatttcagtaagaaacccaaactttctagaaaattggcttggcagatgagctaagcaaaaaaaaaaaaaaaaagcaacaaaataaccttttcatcagagttaaaagtagtgagaatctggttagttatacgtaataccaaaggtaaacattaaagaagacattatcaggcaatttcaaagaattctttcatgctatttcttaaccctgacatttctaactttattgcaggcaatatacaaagattggctcactactccataggttaattgaattcctggttgagaaactaacttgttttgttttccaaaattagctgaaatcttgtaaaacatgacttccctttaaaggatctagatattgttcaatttaaaatatggcaccataaaaaagtcatgtagtaatagagcatatgcttttttagaaccaggttaaaagctgtttgttatctaatagagtaaaagttactgaggtcaacagatagacaggtctggcataatatatgccccagtcataatagtctaattatattcttttgacaacagacagcattcatcagagcactaattcgaatgagagttttggctatcaagatgtgttgattctaaatattattgaatgagacctgattaaagtctgacttttcctggccccagtgttttgcaggttggctatttccattatcagcccatcactccataaagttcttagctgccaccaagtgattggtgaacaaggacaacaacaaaagcagcatacattgtatggatttatctcaacggctattgtttaatggctgtgtttaaatgtgatctatctggaaaatgaggactccggaataaaaagctattactaataaaaaaaaa

SEQ ID NO: 132 - DNA, 1417 bp, Homo sapiens
  misc_feature: Incyte ID No: LG:982697.1:2000FEB18
  unsure 788, 802, 1173, 1187, 1207: a, t, c, g, or other
gtggtgtggctgcttctagccacttatattcagatgtgggagcaaagacaaaaggtagaacttatatttaaaagggaagcagagcaaaaaaagtttggaaaatttgcagcctggccatgtggcagagaaagaaaaaagctttttcagtagaggaattcaagcagactgtggaacaattacttgctagagatgtttgcaggattaaaggggagccaagtgctactatccaagacaatagggaaaaagccttgaaagcatttcaaagaacttcagagtggcttctcccatcacaggcccagaagcttaggaggagagaatagattcatggactgggcccagggccatggtaccttgcacagccttgggacactgctcaccacatcctagctgctcctgttcccactcttgccatggctcaaaggggcctacatacagcttggactgccactttggagaatgcaaacagtaaaccttggtagctttcatgtggtgttaagcctgcaggcacacaaagtgcaagaatcgtggattcttggcagcctctgcctagatttcagaggacatatggaaaagtctgtttgtccaggcagaagcctgttacaggggtggagcccttacaaagaacctctactagggcagtatagaggggaaatgtggggttggaggctccaacagggtcaccgctggggcactgcctaatggaactatacgaagtgggccactgccctccagacctaaggatgatagatctaccagcagcttgtattctgcacctggaaaagccacangcactcaactgcancccatgagcgcagccttggattctttaccctgcaaagccataggggcaggactgctcaaggcctggggagcccaccccttgtaccagtgtggcctggatgtggaacatgatgtcgaagattattttggaactttaagatttagtgacttccctactgggttttggagctgtgtggatcctgtagaccctttcttttggccaatttccccctttttgggatggaaacatttacccaatccctatacccccattgtatcttggaagtaaataatttgtttttgattttacaggctcataagtggaagggacttgccttgtctcatatgagactttggacttggacttttgaattaatgctggaatgagttaanactttgagggactnttgggaagatataactgtantttgcagtatgagaaggacatgagatttgggagacaccagaggtggaataatatgatttggatctgcatccccaccaaaatctcatgttcaattgtaatcctaaattttggaggttgagcctggtggaagaggttggataatgggggtggtttctcatggtttaacaccatccccctgggtgctgttctcatgacagtgagtgagttatt

SEQ ID NO: 133 - DNA, 1143 bp, Homo sapiens
  misc_feature: Incyte ID No: LG:1080896.1:2000FEB18
gccgacagcataatgtgaggcaagtctagctgttcccccccggcatacaagcttatagagcaggctcctttgaagatcttcaggtggacttcacagaaattgccaagttgtggaggtgtcgaagtgtggatcaaggactggaacgtagcctcttgtgcccatggtgaaggacccagatgtcgtcctgatcactcccactgctgtgaacgtagagagaatcctagcctggatccatcacaaccgtgtaaaacctgcagcgcctgaatcctgggaggcaagaccaagtctggacaacccctgcagagtgaccctgaagaagatgacaagccctgctccagtcacacccagaagctgactggtccacgcacagccgaagcatgaggaagctcattgtgggcttcatttttcttaaattttggacttacagtaagggcttcaactgaccttcctcagactgagaactgtttccagtatatacatcaagtcactgaggtaggacaaaagattgctacattcctattattttatggttattataagtgtaccaggactctaaaagaaacttgtttgtataatgctattctatccaaggtatgtagcccaggaaataaccaacttgatgcgtgttatgacccattttaagcctcccatgatcacagtttttaaaatacaattaaggactggtccttttctaggtgacacaagaaaggaaatagctagaacagaagaaaaaggggtccccaaaaatgtaaccttaaaatttgacgcttgtgccactattgatagtaagcagcatggaataggatgcggttctctaaattggaaaaaaaagttacacagcagaaaataagtacatctgtcaaaaatcatatttatgcgagatgtgtcaatactggtcttgtgtcatttgagctacttaaaaagaaaataaaaaaagatcctgtttggctccaaaaatgaaaagtcagcccctcctgcacaagtgggagctgcatccttttaaaattgataatcacaaacccctcagacccaagtaaaataaaaaaaaatgtaacattaggcattgatggaaaagggctggatcttagtgtaagcatcctaataaaaggagaggttcaaaaacgctctccagaaccagtaaaa

SEQ ID NO: 134 - DNA, 899 bp, Homo sapiens
  misc_feature: Incyte ID No: LI:811341.1:2000FEB01
  unsure 500: a, t, c, g, or other
acctgacctgacaaaactctttacactctatgtgtcagaaagagaaaaaatggcagttggagttttaacccatactgtgaggccctggccaaggccagtggcctatctctcaaaacaactagacaggatttccaaaggctggcccccaggtctaagggccctagcagcaacagccctgttagcacaagaagcagataaactaacccttaggaaaacctgaatataaaggccccccatgctgtggtaactttaatgactaccaaaggacctcattggttacaaatgctagattaaccaagtaccaaagcttgctatgtgaaaatccccacataaccactgaagtttgcaacaccctaaccccaccaccttgctcctggtatcagagagcctagttgaacatactgtgtagaggtgttggactcagtttattctagcaggcccaacctccgagactatccttaaacatcagtagactgtgaggggtacgtggacgggagtanttcgccaacccctgcaaagtgactctgaagaagacgacaagctctgctccagtcacacccagaagctgactggtccacgcacggccgaagcatgagaaaactcattgcggaactcattttccttaaaatttggacttttacagtaaggacttcaactgaccttcctcagactgaggactgttccagtgtatacatcaagtcactgaggtaggacaaaaggttgctacagtcctattattttatggttattataagtgtactggaactctaaaaataacttgtttgtataatgttattctgtacaaggtatgtagcccaggaagtgaccaacctgatgtgtgttatgacccatctgagcctcccatgaccacggtttttaaaataagattaaggactgag

SEQ ID NO: 135 - DNA, 923 bp, Homo sapiens
  misc_feature: Incyte ID No: LI:903225.1:2000FEB01
  unsure 239: a, t, c, g, or other
ggaggaaggtaatgaaggagattatcttatcctacttattattttacttccttattctgtgggacagaagaatctcttgagtcctctaaaaaactatatgctgatagcaggagttacagaacaattcagtagtgtctggaatagaacagtggtttgaaaagtagagggcttgttaaagcacgggatgctgattcagtaggccttgagtggggataatttacatatccaacaggccaggngatgccctggcttggggatcacattttgtgactgatgcagagtactgatggtcatccagtccccttccttcggtgtttgagaccacttcatctggaccgagctaaagtctaggaagaaataaagtttcaaacccagtagagttacctcaaagatacacttgagacccttttcagaagatggcaccgaaagtgaagaaggaagctcctggcccgcctaaagctgaagccaaagcaaaggctttaaaggccaagaaggtagtgttgaaaggtgtccacggccacaaaaaaaagaagatccgcatgtcacccaccttccagcggcccaagacactgagactctggaggccgcccagatatcctcggaagaccacccccaggagaaacaagcttgaccactatgctatcatcaagtttcctctgaccactgagtttgctatgaagaagataaaagacaacaacacccttgtgttcactgtggatgttaaagccaacaagcaccagatcaaacaggctgtgaagaagctctgtgacattgatggggccaaggtcaacaccctgatggagagatgaaggcatatgttccactggctcctgattatgatgctttggatgttgccaacaaaattgggatcatccaaactgagtccatctggctaattctaaatatacatatctcttttcacc

SEQ ID NO: 136 - DNA, 343 bp, Homo sapiens
  misc_feature: Incyte ID No: LI:242079.2:2000FEB01
gctcagggtcctgctgccctgcacaacctcaggaaactgctccctgaatcccagctactacagctccagctgtggctcaaaggaccccaggtatagctcaggctgcctgtccagaggatgcaagccataagccttagtggctcccgtgtggtgttaaattaagcctgtgggcacatagagtgcaagaattgaggcttgggagcctccaactagatttcagagtatgtgtgggaaagcctggatgtccaggcagaagccagctgcagggacagagccctcatggagaacctctactagggtagtgtggaggggaaatttggggttggagttcccacacagcttc

SEQ ID NO: 137 - DNA, 1227 bp, Homo sapiens
  misc_feature: Incyte ID No: LG:979580.1:2000MAY19
cttggatatctgctcatttggcccgatgagaagagaaaaacagaaaacaaaagctctgagtgggtagagcgtggggggagcttgaagctgttattaaaggaaggtatgattaactcctaactcacagccgcttcagctcatctccatggctcagccaccaggccagcctttgctgtcacctaacagataattattgtcttttctacaatatgattaagtggaaggagaatcagaacactgtagaactggatctgatatttcttgttagcatatatatatatatttaatctatgtgcttgtccttgaaaacagcacttcctgtacccagcaatcacagagctgctcttggaatttaacaccctggtggttctcaaatgccatctgaaaaacattattagtgttacccatcatgacctctgggtagtggaaggtgaatgggagaaatctctccccatttgaagaaatagggaaccagtctcactttgttgcccaggctggagtgcagtggcacaatcttgctcactgcaaccaccacctcccgggttcaagcgatcctcccacctcaacctcccaggtagctgggtctgcaggcgtgcgccaccacacccggctaatttttgtgtttttagtacagaaagagtttcaccatgttgaccaggctggtctcaaactcctaacctcaagtgattggcccacctgggcctcccaaagtgctgggattacaggtgtgagccactgcagcccagcctacgaagttgtttttgcggttaagcagcaatttggaaacgaagcatttctgaggagctcagtttaagaaacactgtgatgttgtgttttaaacctatgaactcccctccgtagctcatccctctacttttccatctaaccccagtactggcaccttctctatgattagtaaatttcttcagctagaaatgttacagtctgttttttaacaatgaagtcaggacccagtggattatagcattgttacacttcatgctcatgttatataaaattgcataaaatgtattaaaatttatgtctgctcttatctctgccttgcaaagaatgaatttgtatagcttttaactaagcatgtaacgggggcagcaccacatctggaattcaagctgactttctcacgtaccgtaatctttgtgcttgggtctaataagtacaacccccatggtgtggtttatcatttttttattgtatgcacaatct

SEQ ID NO: 138 - DNA, 1259 bp, Homo sapiens
  misc_feature: Incyte ID No: LI:1169865.1:2000MAY01
ccggttgtagatgtatctctccaggaagcgctgtgtcccattaaacgcgtagattcctgccgtccctggaaaatgtgaatcccagccatgctgattcctgtccagccatttccagtgctagaggcccacagtttcagtctcatgtgcctccagtcggcctcagttcctcatcactgttcctgtgctcacagtcatcaattatagaccccacaacatgcgccctgaagacagaatgttccatatcagagctgtgatcttgagagccctctccttggctttcctgctgagtctccgaggagctggggccatcaaggcggaccatgtgtcaacttatgccgcgtttgtacagacgcatagaccaacaggggagtttatgtttgaatttgatgaagatgagatgttctatgtggatctggacaagaaggagaccgtctggcatctggaggagtttggccaagccttttcctttgaggctcagggcgggctggctaacattgctatattgaacaacaacttgaataccttgatccagcgttccaaccacactcaggccaccaacgatccccctgaggtgaccgtgtttcccaaggagcctgtggagctgggccagcccaacaccctcatctgccacattgacaagttcttcccaccagtgctcaacgtcacgtggctgtgcaacggggagctggtcactgagggtgtcgctgagagcctcttcctgcccagaacagattacagcttccacaagttccattacctgacctttgtgccctcagcagaggacttctatgactgcagggtggagcactggggcttggaccagccgctcctcaagcactgggaggcccaagagccaatccagatgcctgagacaacggagactgtgctctgtgccctgggcctggtgctgggcctagtcggcatcatcgtgggctccgtcctcatcataaagtctctgcgttctggccatgacccccgggcccaggggaccctgtgaaatactgtaaaggtgacaaaatatctgaacagaagaggacttaggagagatctgaactccagctgccctacaaactccatctcagcttttcttctcacttcatgtgaaaactactccagtggctgactgaattgctgacccttcaagctctgtccttatccattacctcaaagcagtcattccttagtaaagtttccaacaaatagaaattaatgacactttggtagcactaatatggagattatcctttcattgagccttt

SEQ ID NO: 139 - DNA, 2604 bp, Homo sapiens
  misc_feature: Incyte ID No: LG:337818.2:2000FEB18
cgcggagcctgggagaggagaaggagccgacctgccgagatggaggcgaccggcacctgggcgctgctgctggcgctggcgctgctcctgctgctgacgctggcgctgtccgggaccagggcccgaggccacctgccccccgggcccacgccgctaccactgctgggaaacctcctgcagctacggcccggggcgctgtattcagggctcatgcggctgagtaagaagtacggaccggtgttcaccatctacctgggaccctggcggcctgtggtggtcctggttgggcaggaggctgtgcgggaggccctgggaggtcaggctgaggagttcagcggccggggaaccgtagcgatgctggaagggacttttgatggccatggggttttcttctccaacggggagcggtggaggcagctgaggaagtttaccatgcttgctctgcgggacctgggcatggggaagcgagaaggcgaggagctgatccaggcggaggcccggtgtctggtggagacattccaggggacagaaggacgcccattcgatccctccctgctgctggcccaggccacctccaacgtagtctgctccctcctctttggcctccgcttctcctatgaggataaggagttccaggccgtggtccgggcagctggtggtaccctgctgggagtcagctcccaggggggtcagacctacgagatgttctcctggttcctgcggcccctgccaggcccccacaagcagctcctccaccacgtcagcaccttggctgccttcacagtccggcaggtgcagcagcaccaggggaacctggatgcttcgggccccgcacgtgaccttgtcgatgccttcctgctgaagatggcacaggaggaacaaaacccaggcacagaattcaccaacaagaacatgctgatgacagtcatttatttgctgtttgctgggacgatgacggtcagcaccacggtcggctataccctcctgctcctgatgaaataccctcatgtccaaaagtgggtacgtgaggagctgaatcgggagctgggggctggccaggcaccaagcctaggggaccgtacccgcctcccttacaccgacgcggttctgcatgaggcgcagcggctgctggcgctggtgcccatgggaataccccgcaccctcatgcggaccacccgcttccgagggtacaccctgccccagggcacggaggtcttccccctccttggctccatcctgcatgaccccaacatcttcaagcacccagaagagttcaacccagaccgtttcctggatgcagatggacggttcaggaagcatgaggcgttcctgcccttctccttagggaagcgtgtctgccttggagagggcctggcaaaagcggagtgcttcctcttcttcaccaccatcctacaagccttctccctggagagcccgtgcccgccggacaccctgagcctcaagcccaccgtcagtggccttttcaacattcccccagccttccagctgcaagtccgtcccactgaccttcactccaccacgcagaccagatgaaggaaggcaacttggaagtggtgggtgcccaggacggtgcctccagcctcaacagtgggcatggacagggttaatgtctccagagtgtacactgcaggcagccacatttacacgcctgcagttgttttccggagtctgtcccacggcccacacgctcacttgactcatgctgctaagatgcacaaccgcacacccatacacaactacaagggccacaaagcaactgctgggttagctttccacagacataaatatagtccatctgcaatcacaagcacatagccaggtaacccaccaactcccctggatctgcagcccacacgtgggagtctggctgtcaccttcacaagccacagaaacggccacacatgttcacagctcacacgccctctccattcatcgaacttctcagtgtccctgtccctggtgcctggcacagggaacagcatgccccctccggggtcatgccacccagagactgtcgctgtctatggccccaactcatgctccctctcttggctacaccactctcccagcctgtgaccaccgatgtccacacacccccaaccacttgtccacacagctacccacgtacgacatcgtcctggctccccagagtatcttcccactgagacacgccgcccccacagaggcacagtccccagccacctctgcaactgcagccctcagtcacccctttttaagcaccctgattctaccaaatgcaaacacatctgggtctgcgattatgcacagagactttggacatacgaggaccctcagaccggaggaacacctgcccaaccccaacacgtgcttatgtaaccacgtggaaagcggcccctgctgcccctccacacacacatacacactcactgatctacagcccctgttcggcgtcagagtccccactagacccagtggaaggggttagagaccaagtaggggccagtttccaattcaccctgtcagggagtgagccggatctgacgttccttgtgacttaagggtccggcttgggaattaaagtttgtttctggcctttagcct

SEQ ID NO: 140 - DNA, 2114 bp, Homo sapiens
  misc_feature: Incyte ID No: LI:337818.1:2000FEB01
cgcggagcctgggagaggagaaggagccgacctgccgagatggaggcgaccggcacctgggcgctgctgctggcgctggcgctgctcctgctgctgacgctggcgctgtccgggaccagggcccgaggccacctgccccccgggcccacgccgctaccactgctgggaaacctcctgcagctacggcccggggcgctgtattcagggctcatgcggctgagtaagaagtacggaccggtgttcaccatctacctgggaccctggcggcctgtggtggtcctggttgggcaggaggctgtgcgggaggccctgggaggtcaggctgaggagttcagcggccggggaaccgtagcgatgctggaagggacttttgatggccatggaggaacaaaacccaggcacagaattcaccaacaagaacatgctgatgacagtcatttatttgctgtttgctgggacgatgacggtcagcaccacggtcggctataccctcctgctcctgatgaaataccctcatgtccaaaagtgggtacgtgaggagctgaatcgggagctgggggctggccaggcaccaagcctaggggaccgtacccgcctcccttacaccgacgcggttctgcatgaggcgcacgggctgctggcgctggtgcccatgggaataccccgcaccctcatggcggaccacccgcttccgagggtacaccctgccccagggcacggaggtcttccccctccttggctccatcctgcatgaccccaacatcttcaagcacccagaagagttcaacccagaccgtttcctggatgcagatggacggttcaggaagcatgaggcgttcctgcccttctccttagggaagcgtgtctgccttggagagggcctggcaaaagcggagtgcttcctcttcttcaccaccatcctacaagccttctccctggagagcccgtgcccgccggacaccctgagcctcaagcccaccgtcagtggccttttcaacattcccccagccttccagctgcaagtccgtcccactgaccttcactccaccacgcagaccagatgaaggaaggcaacttggaagtggtgggtgcccgggacggtgcctccagcctcaacagtgggcatggacagggttaatgtctccagagtgtacactgcaggcagccacatttacacgcctgcagttgttttccggagtctgtcccacggcccacacgctcacttgactcatgctgctaagatgcacaaccgcacacccatacacaactacaagggccacaaagcaactgctgggttagctttccacagacataaatatagtccatctgcaatcacaagcacatagccaggtaacccaccaactcccctggatctgcagcccacacgtgggagtctggctgtcaccttcacaagccacagaaacggccacacatgttcacagctcacacgccctctccattcatcgaacttctcagtgtccctgtccctggtgcctggcacagggaacagcatgccccctccggggtcatgccacccagagactgtcgctgtctatggccccaactcatgctccctctcttggctacaccactctcccagcctgtgaccaccgatgtccacacacccccaaccacttgtccacacagctacccacgtacgacatcgtcctggctccccagagtatcttcccactgagacacgccgcccccacagaggcacagtccccagccacctctgcaactgcagccctcagtcacccctttttaagcaccctgattctaccaaatgcaaacacatctgggtctgcgattatgcacagagactttggacatacgaggaccctcagaccggaggaacacctgcccaaccccaacacgtgcttatgtaaccacgtggaaagcggcccctgctgcccctccacacacacatacacactcactgatctacagcccctgttcggcgtcagagtccccactagacccagtggaaggggttagagaccaagtaggggccagtttccaattcaccctgtcagggagtgagccggatctgacgttccttgtgacttaagggtccggcttgggaattaaagtttgtttctggcctttagcct

SEQ ID NO: 141 - DNA, 773 bp, Homo sapiens
  misc_feature: Incyte ID No: LG:241577.4:2000MAY19
ccaggtcgcgctcccactgccgagcccgcgagatgctccccagagctgcctggagcttggtgctgaggaaaggtggaggtggaagacgagggatgcacagctcagaaggcaccagtgagacctggactccttcctccctgcctaactccagagataggggcaggggtcccctctgcaggctgccccctttgcccttccatgccaccctgggcctgttcctaccacacttcccatgttcccatgatcccactccttggtccaaggtcaagtttctccaggaaatggagtgcgcgggcccgtggtggggggaagatgtccccctacaccaactgctatgcccagcgctactaccccatgccagaagagcccttctgcacagaactcaacgctgaggagcaggccctgaaggagaaggagaagggaagctggacccagctgacccacgccgaaaaggtggccttgtaccggctccagttcaatgagacctttgcggagatgaaccgtcgctccaatgagtggaagacagtgatgggttgtgtcttcttcttcattggattcgcagctctggtgatttggtggcagcgggtctacgtatttcctccaaagccgatcaccttgacggacgagcggaaagcccagcagctgcagcgcatgctggacatgaaggtgaatcctgtgcagggcctggcctcccgctgggactatgagaagaagcagtggaagaagtgacttgcatccccagctgtctccctggagtccgccctggctgggac

SEQ ID NO: 142 - DNA, 296 bp, Homo sapiens
  misc_feature: Incyte ID No: LG:344786.4:2000MAY19
cccatcttgtggagcgtactttcattttcaatagagctttgcttttgttgcttcattctttccttgctttgtgtgttttgtccaattctttgttcaagacaccaagaacctagacaccctccaccagtaacatattctagtgagccagccaggagtttattcaggatgataacatggagaagcttgaggaaattattgaaaaataccctcgtgccttccctttctggattgggccctttcaggcatttttctgtatctatgacccagactatgcaaagacacttctgagcagaaca

SEQ ID NO: 143 - DNA, 1171 bp, Homo sapiens
  misc_feature: Incyte ID No: LI:414307.1:2000FEB01
  unsure 574, 583: a, t, c, g, or other
cgggatgggaaaactatgcctggggccgacgctctgcccggctgctgccgctgaggaaagccgggacgcggagccccgccgagagcttctttgctccggacgcccctggacgtggcgggcagccgcgagggtaaccaccatgatcccctgggtgctcctggcctgtgccctcccctgtgctgctgacccactgcttggcgcctttgctcgcagggacttccggaaaggctcccctcaactggtctgcagcctgcctggcccccagggcccacccggccccccaggagccccagggccctcaggaatgatgggacgaatgggctttcctggcaaagacggccaagatggacacgacggcgaccggggggacagcggagaggaaggtccacctggccggacaggtaaccggggaaagccaggaccaaagggcaaagccggggccattgggcgggctggcccccgtggccccaagggggtcaacggtacccccgggaagcatggcacaccaggcaagaaggggcccaagggcaagaagggggagccaggcctcccaggcccctgcagctgtggcagnggccatacnaagtcagctttctcggtggcagtgaccaagagctacccacgggagcggctgcccatcaagtttgacaagattctgatgaacgagggtggccactacaatgcttccagcggcaagttcgtctgcggcgtgcctgggatctactacttcacctacgacatcacgctggccaacaagcacctggccatcggcctggtgcacaacggccagtaccgcatccggacctttgatgccaacaccggcaaccacgatgtggcctcaggctccaccatcctggctctcaagcagggtgacgaagtttggctgcagatcttctactcagagcagaacgggctcttctatgacccttactggacagacagcctctttacgggcttcctaatctatgccgaccaggatgaccccaacgaggtatagacatgccacggcggtcctccaggcagggaacaagcttctggacttgggcttacagagcaagaccccacaactgtaggctgggggtggggggtcgagtgagcggttctagcctcaggctcacctcctctgcctctttttttccccttcattaaatccaaagctttttattcatcc

SEQ ID NO: 144 - DNA, 372 bp, Homo sapiens
  misc_feature: Incyte ID No: LI:202943.2:2000FEB01
gtgtgaaagccacttattattccaccaaaactgtctgtttctagaacctataaaatgtaaggctccaggaaatccggaaaatggactcctcaggtgagatttatacagtaggtgccgaagtcacattttcgtgtcaggaaggataccagttgatgggagtaaccaaaatcacatgtttggagtctggagaatggaatcatctaataccatattgtaaaggtatgtttagtaaatttaccacgtttcttatgtttggcaatcctagaaaggtaaggcgtagacatatgaagtgttatgttgtatcaatgttctttgtatttgaactgaggtattaggctcatgtttgaacatgaccccacacacacacacacc

SEQ ID NO: 145 - DNA, 337 bp, Homo sapiens
  misc_feature: Incyte ID No: LI:246194.2:2000FEB01
  unsure 73, 82, 105, 126, 154, 334: a, t, c, g, or other
tcctcaacccaccaccgccgcagcactggtgcccccaccccaggcctccctccaccacctccagccaccaggngctcctgcnctgctgcctccgccgcaccaggncctggggcagccccagttggngcccccactcctgcatccaccacctgcncagtcctggcccgcacaacttccccctcgggctccactgccaggtcagatgctgctgagcgggggtccccggggcccggtcccccagccgggcctgcagcccagcgtcatggaggacgacatcctcatggatctcatctgaatccccaacacccaataaagttcctttttaacacaaaanaaa

SEQ ID NO: 146 - DNA, 866 bp, Homo sapiens
  misc_feature: Incyte ID No: LI:815961.1:2000FEB01
  unsure 741, 759-760, 763, 788, 837: a, t, c, g, or other
gaaaggatgttgcagtcataggacctgtggaagagatgggactgctgcctgtagttggggaatgtgtggtgaagggtatggttagcctgctgctggtggccgaggtggtgtgggccacaggggttctggtgcctgtactggtgtggttgggggtgatggtggtggtagaagttggggtgacttcaggatagtgtgtggaggaagtgtgtgaatgtaaggatgtagaggttttgcctgtgctaaatgagcttgcggatgggctggtcccactggtggtcactgtgattggtggggctgtgtgggtggaccctgtgaccttgagcgttgttagtggaggaatggtgcctgttggcgttgagtggatggaggcagaagtggacatctgtgcatgggtaggggtgatgaccttgtgagtacttggagtcaccaaggaggtggagaaaggtggaatgtgagtgggaagtgtggtctgagggtgtgatggggttggataggtagtggtggtctgaaaggatggtgcagtcataggacctgtggaagagatgggactgctccctgtaggtggggaatgtgtggtgaagggtatgggtagcctgctgctggtggccgaggtggtgtgggccacaggggttctggtgcctgtactggtgtggttgggggtgatgttggtggtagaagttggggtgacttcaggatagtgtgtggaggaagtgtgtgaatgtaaggatgtagaggttttgnctgtgctaaatgagcttnnggnttggctggtcccactggtggtcagnatcattggtggggctgtgtgggtggaccctgtggccttcagcgttgtcngtggaggaatggtgcctgttggcattgag

SEQ ID NO: 147 - DNA, 1115 bp, Homo sapiens
  misc_feature: Incyte ID No: LG:120744.1:2000MAY19
  unsure 776: a, t, c, g, or other
cgctgcagggagaacggactccgggcggagggcagccaatccgtttcagcgcaggtcttgctcgggttgggcttgccactgcctggaacatacctgtccccctggcgcaacactcagctggctgcgacggcaaccccgagcctggacactgcgccaggaatcctaaaaccaaaatattagaacgaaaacagaaacatggctcactatattacatttctctgcatggttttggtgctgcttcttcagaattctgtgttagctgaagatggggaagtaagatcaagttgtcgtactgctccgacagatttagttttcatcttagatggctcttatagtgttggcccagaaaactttgaaatagtgaaaaagtggcttgtcaatatcacaaaaaactttgacatagggccgaagtttattcaagttggagtggttcaatatagtgactaccctgtgctggagattcctctcggaagctatgattcaggagaacatttgacggcagcagtggaatccatactctacttaggaggaaacacaaagacagggaaggccatccagtttgcgctcgattacctttttgccaagtcctcacgatttctgactaagatagcagtggtacttacggatggcaaatcccaagatgacgtcaaggatgcagctcaagcagcaagagatagtaagataacattatttgctattggtgttggttcagaaacagaagatgccgaacttagagctattgccaacaagccttcgtctacttatgtgttttatgnggaagactatattgcaatatccaaaataagggaagtgatgaagcagaaactttgtgaagaatctgtctgtccaacacgaattccagtggcagctcgtgatgaaaggggatttgatattctttaggtttagatgtaaataaaaaggttaagaaaagaatacagctttcaccaaaaaagataaaaggatatgaagtaacatcaaaagttgatttatcagaactcacaagcaatgttttcccagaaggtcttcctccatcatatgtatttgtgtctactcaaagatttaaagtcaagaaaatttgggatttatggagaatattaactattgatggaaggcca

SEQ ID NO: 148 - DNA, 2448 bp, Homo sapiens
  misc_feature: Incyte ID No: LI:757520.1:2000MAY01
tgagcctcgcactctgccgcccgcaccaccttccgctgcctctcagactctgctcagcctcacacgatgtcgtgccgctcctacaggatcagctcaggatgcggggtcaccaggaacttcagctcctgctcagctgtggcccccaaaactggcaaccgctgctgcatcagcgccgccccctaccgaggggtgtcctgctaccgagggctgacgggcttcggcagccgcagcctctgcaacctgggctcctgcgggccccggatagctgtaggtggcttccgagccggctcctgcggacgcagcttcggctaccgctccgggggcgtgtgcggacccagccccccatgcatcactaccgtgtcggtcaacgagagcctcctcacgcccctcaacctggagatcgaccccaacgcacagtgcgtgaagcaggaggagaaggagcagatcaagtccctcaacagcaggttcgcggccttcatcgacaaggtgcgcttcctggagcagcagaacaagctgctggagaccaagtggcagttctaccagaaccagcgctgctgcgagagcaacctggagccactgttcagtggctacatcgagactctgcggcgggaggccgagtgcgtggaggccgacagcgggaggctggcctcagagctcaaccatgtgcaggaggtgctggagggctacaagaagaagtatgaagaggaggtggccctgagagccacagcagagaatgagtttgtcgttctaaagaaggacgtggactgtgcctacctgcggaaatcagacctggaggccaatgtggaggccctggtggaggagtctagcttcctgaggcgcctctatgaagaggagatccgcgttctccaagcccacatctcagacacctcggtcatagtcaagatggacaacagccgagacctgaacatggactgcatcatcgctgagatcaaggctcagtatgacgatgttgccagccgcagccgggccgaggctgagtcctggtaccgtagcaagtgtgaggagatgaaggccacggtgatcaggcatggggagaccctgcgccgcaccaaggaggagatcaacgagctgaaccgcatgatccagaggctgacggccgagattgagaatgccaagtgccagcgtgccaagctggaggctgctgtggctgaggcagagcagcagggtgaggcggccctcagcgatgcccgctgcaagctggctgagctggagggcgccctgcagaaggccaagcaggacatggcctgcctgctcaaggagtaccaggaggtgatgaactccaagctgggcctggacatcgagatcgccacctacaggcgcctgctggagggcgaggaacacaggctgtgtgaaggtgtgggctctgtgaatgtctgtgtcagcagctcccgtggtggagtctcctgtgggggcctctcctacagcaccaccccagggcgccagatcacttctggcccctcagccataggcggcagcatcacggtggtggcccctgactcctgtgccccctgccagcctcgttcctccagcttcagctgcgggagtagccggtcggtccgctttgcctagtagagtcatggagccagggcttcctgccaagcacctgcctgcctgcatcactgcactgaatggcatgtgaatggaaaatgtgtgcttgcttccagaatcttctggatgttcctacagaggggaagacctacagagggaaagaccctcgggccgctcccctgcgccttttcatgctagggagatgcatcctagttgtcctcctggcagctgttttcagaggcattcccagcccttcacttaactcctacttagctccaaaatacctgtatccaatttgtattattcccccagctctcagggacaagaccagtcccccagcgtggtggtcagcacggaagctccaccttctgggtggaggcgccatcctaaccatccagccaggccacccacaacccgagaatcagggagaaagtccctccccagcagccccctcctcctggctgggaagaatggtcccccagcaagcacttgcctgttcattcccgttcatgttttgcttctctctcagactgccttcctgcttctgggctaacctgttccaagccaggctcctcaatgtgacctcgcagttgagaagcccattatcgtggggcatccttttgcctacagcccctggttagggcactttggacaggtcttgctattcagtgaacctttgtacatttcaaagaagactccatggctgctccagatgcccccttgctgggtgcaggtggggactgtccaatgcagagctggcgggacagagagttaagccacttcctgggtctccttcttatgactgtctatggggtgaattgccttctggggttgtctcgatctgtgtttcaataaatgccgctgcaatgcaaaaaaaaa

SEQ ID NO: 149 - DNA, 650 bp, Homo sapiens
  misc_feature: Incyte ID No: LG:160570.1:2000FEB18
  unsure 609: a, t, c, g, or other
gcttccccggcggctcccgggcgctgactctcccgggcttttccgcctttctcgctcccgccccgccgggcggttcggcggccggtccccggaccccgccgggagctgctcgtctcaccctcgccacggcgcggacaataaattaatgcatcgcgcttgagtggagggggcggctgggcgcctcggtggtagctttctctcctggctggagacgaccacaaccgacatgggctgtttctgcgctgttccggaagaattttactgcgaagttttgctcctggatgaatccaagttaacccttaccacccagcagcagggcatcaagaagtcaacgaaaggttccgttgtccttgaccacgtattccatcacgtaaaccttgtggagatagattattttgggctacgttactgtgacagaagccatcagacgtattggctggatcctgcaaaaacccttgctgaacacaaagaactgatcaacactggacctccatatactttgtattttggtattaaattctatgctgaagatccatgtaaacttaaagaagaaataaccaggtatagtattgactttgtttttgaacagatacatgcattgcgtatacnaaaagctttatttaaaacaaattaaaattgggctaaacgtt

SEQ ID NO: 150 - DNA, 257 bp, Homo sapiens
  misc_feature: Incyte ID No: LI:350398.3:2000FEB01
  unsure 22, 117, 120, 220, 246: a, t, c, g, or other
cagctgctcctgacactcccanaactgtcgccagcggggaggggaggcagtagggactgccgaagcctggggccctggtgggtgacagggcagcaccagcctgggtccagccacctntcncacaggtgaaccgcttccacaagatccggaaccgggccctcctgctcacagaccagcacctctacaagctggaccctgaccggcagtaccgggtgatgcnggccgtgccccttgaggcggtgactngctgagcgtga

SEQ ID NO: 151 - DNA, 1554 bp, Homo sapiens
  misc_feature: Incyte ID No: LI:221285.1:2000FEB01
gcctggctgccaggggcgtgttatcgcgggggcagcctgggagcgctgctgcgccgcggcaggagaaacagccgaggacaccctggaagagcaggagcacgtgggcctgcgagaatggcgccaacaccagccctgcaaagccacattccaaagccgggccaaggacagccaccgttgccccgcaggcctcaaggatgacggtcaagccagccaaggccgcctccctagccaggaacctcgcaaagcgcaggcgcacctacctgggtggcgcggctgggcggagtcaagagccggaagtcccttgtgccgcagtccttcccgggaaacctggggaccggaactgcccggagttcccgcccccagacagaaccctgggttgctgggcaaccgatgcggcccccgcagctggtctctgtggtgctgggagcgagcccagtatagctcccacctcctgcgctggtaacctcccgtcccgcccgcctcccttgttgtcgcctctcctcgcgtcgcggaatccttgcccttggcactacttacatctctccgggtcccacaacaccttagcgcccacctgcttcaaagccaagctccaccgaaagcgaggcagtcagcccccggacatggcctcagcgctgactgatcgcacctctcgggccccgagcacctacacctacaccagccggccccgagcactgccctgccagcgcagccgttaccgggacagcctgacgcagccagatgaagaacctatgcattatggaaacataatgtatgacagaagggtaattcgaggtaacacttatgcactccagacagggccactgctcggacggcctgattctctagagctccagagacaacgggaggctaggaagagggctcttgccagaaaacaagcccaagagcagctcagaccacaaacacctgaacctgtggaaggcagaaagcatgtcgatgtgcaaacagaattataccttgaagaaattgctgatcgcataatagaagttgatatggaatgccaaacagatgcatttttggacagaccaccaacaccactctttattcctgccaaaactggcaaagatgtggccacccaaatactagaaggagagctctttgactttgatcttgaagttaaaccagtgttagaagttttggtggggaagacaattgagcagtctcttctggaagtaatggaagaagaagagctggctaacctgcgggccagtcagcgtgagtatgaagaactacggaatagtgaacgtgctgaagttcaacgacttgaagagcaagagaggcgacaccgagaagaaaaagaacggcgtaagaaacagcagtgggaaataatgcacaagcacaacgagacatcacaaaaaatcgccgcccgagcatttgcacagcgttacctggctgaccttctcccgtctgtttttggcagcctcagggatagtggctacttttatgatcccattgaaagagatattgagataggatttcttccatggctaatgaatgaagttgaaaaaaccatggaatatagcatggtgggaagaa

SEQ ID NO: 152 - DNA, 623 bp, Homo sapiens
  misc_feature: Incyte ID No: LI:401605.2:2000FEB01
ctggcagggctggaacatgaagaaagagaagaattttatttatctacgccagaaaactaccactacttgaatcagtctggatgtgtagaagacaagacaatcagtgaccaggaatcctttagggaagttattgtaagttacttttaaatgttttccctattaagatatcagataccttattaagagtaacagatttcattttcggtttcaaaagatttttttaaatagaaatagaagtaattccatttggaccagtgggtgagaacaggtatttccttcttgttccaagtcatgaacttgttccaagttctaggctgaaaggggtttgaggactcttctttccttagaagatgagcgaatgtgtcattcagggcagatgggcagtttacttgggacagtgtgttcagaaagtgtaccttccacccccaaaaaaccccccaaatcatgggcttcactctggaaccagcagatcctccattttggggcttacaagtaagatttctttgaaaaacaaattctatagctaaaaacaaatctgccagccattggcccaggtgactgttgttgcagaattttggctctttgttcagctaaaacctgggggtcttgtcacacgatcagga

SEQ ID NO: 153 - DNA, 1038 bp, Homo sapiens
  misc_feature: Incyte ID No: LI:329017.1:2000FEB01
ctgggctggaggctctagcagttgttgcccacctggctgtccatggcaaaagtgggtggggtcatgtgcagcctcctgccacctgagtgtttcccgggacatcaggaggctgtatcctgcagctgaatttacacagaagtggaacaactgggctggaagctctatggcgacaaattggctacttcaagtggtgacactacagttaaattatgggatctatgtacaggcgattgcattttgacctttgaaggacacagccgcgcagtgtggtcctgcacatggcactcctgcggcaattttgtggcttcctcctcactggataaaactagcaaaatttgggatgttaatagtgaaagatgcagatgtactttgtatggacatacagattctgtgaacagcattgagttttttcctttctccaatactcttctcacaagctctgcagacaagaccctgtctatatgggatgcaagaacaggtatatgtgagcagtcactttatggtcacatgcattctatcaatgatgccatttttgatcccaggggtcacatgatagcatcctgtgatgcctgtggggttacaaagctgtgggactttcggaagctgttaccaattgtgtccatcgatataggtccaagtcctggcaatgaggtgaattttgattcatcaggtcgagttttagctcaggcaagtggcaatggtgttatccatttgctagatcttaaatctggggagattcacaaattgatgggccacgaaaacgaggcacacacggttgtgttttctcacgacggggagattctcttttctggaggctctgacggcacagttcgaacgtggtcttgaccgtcagcacatcccgctgcagagggcattccctttaaggcttgaaaatgcctcctgtagtcccaaaccagcaaagaactggttaaatgtgccagcaggtaacatttacagtctgctttaaaacatgctttggacatatattttagtgctcatactgttactaataaaaaaataactttatgctcaaaaaaa

SEQ ID NO: 154 - DNA, 737 bp, Homo sapiens
  misc_feature: Incyte ID No: LI:401322.1:2000FEB01
  unsure 601, 625, 633, 698, 700, 711: a, t, c, g, or other
gcgacccaatgggagtccccgccaggagacacaaccggcggctctccggggatttataaggtcccgccagcaaccgcgcgttgggattcgtggtgttgctggagacccgtatggtgtctgcagtcagcgaccctccaacttcaactactggatcaaccatgtgtgagtgcatctccatccatgtgggccaggccggagtgcagatgggcaatgcctgctgggagctgtactgcctggagcacgacatccagcccagtggcaccatgcccagccacaaggccctggggagcagtgataactccttcaacaccttcttcagggagacccagcctggcaggcatgtgtcctgggctgtctgtggacctggagcctgctgtcataggttggcatcaactaccagtcccccacagtggtgcccgggggtgctgtagccaaggtgcagcgggcagtctgcgtgctaaacaataccacagccatcactgaggcctggggcccgcctcaaccaaaagtttgacctgatgtatgccaagcgggcatttatgcactgttatgtggacaggggcatggaggaaggtgagctctctgggcctgagaggacctngctgccctggagaaggattatgangtaggcanagaatctttggacagcgaggatgagcatgaggagttctaggggtcctggcacctgtaacacctgntntctcgcaccanagttgtgtgtgtatctcattccactg

SEQ ID NO: 155 - DNA, 2275 bp, Homo sapiens
  misc_feature: Incyte ID No: LG:403409.1:2000MAY19
gtggccgcggcagacggaagccgaacgagttcctcggcggctgcaggatgggggactccaaagtgaaagtggcggtgcggatacgacccatgaaccggcgagagactgacttgcataccaaatgtgtggtggatgtggatgcaaacaaggttattcttaatcctgtaaatacgaatctttccaaaggagatgcccggggccagccgaaggtgtttgcttatgatcattgtttctggtctatggatgaatctgtcaaagaaaagtatgcaggtcaagatattgttttcaagtgccttggagagaatatcctgcagaatgcttttgatggctacaatgcatgtatctttgcctatggacagactggctctggaaaatcttataccatgatgggcacagctgaccaacctggattaatcccaagactttgcagtggactctttgaacgaactcagaaagaggaaaatgaagaacagagttttaaagtagaagtgtcctacatggaaatttataatgaaaaagttcgagaccttcttgatcccaaaggaagccgtcagacgttgaaagtcagagagcatagtgtgttgggaccttatgtcgacggactttctaaactggctgtcacaagctacaaggatattgagtcgttgatgtctgagggtaacaaatctcgcacagttgctgcaaccaacatgaacgaggagagtagccgatcccatgcagttttcaaaatcaccctcacacatactctctacgatgtgaagtctgggacatctggagagaaagtgggcaaactcagcctggtggatttagctggcagtgaacgagcaacgaagacaggcgctgcaggggacaggctgaaggaagggagcaacattaacaagtccctcacaaccctcggtctggttatctcagctcttgcagatcagagtgctggcaaaaacaagaataaatttgttccatatcgtgactcagttctcacttggctgctcaaagacagcctcgggggtaacagcaagaccgccatggtggctactgtgagtcctgcagctgataactatgatgaaaccctctcaactctgcggtatgcagatcgagccaagcacattgtaaaccacgctgtggtgaatgaggaccctaatgcccgaattatccgggatctccgggaagaagttgagaaactccgggagcagctgaccaaagcagaggcaatgaaatctccagagctaaaggaccggctggaagaatctgagaagctaatccaggaaatgactgtgacctgggaggagaaattaaggaaaacggaggagattgcacaggaacgacagaaacagcttgagagtcttggaatatctcttcagtcttcgggaatcaaagttggggatgataaatgcttccttgtgaatctgaatgctgacccagctctgaatgagcttctggtgtactatttaaaggaacatacattgatagggtcagcaaattcccaagatatccaactgtgcggcatgggaattcttcctgaacactgtattatagacatcacgtcagaaggccaggttatgctgactcctcagaagaacaccagaacatttgtaaatgggtcatctgtctccagtccaatacagctacaccatggggacaggatattatggggaaacaatcatttcttcagactcaatttgcctaaaaagaaaaagaaagcagaacgagaggatgaggaccaggatccctccatgaagaacgagaatagttctgagcagctggatgtagacggagactcctccagcgaggtgtccagtgaagttaactttaattacgaatacgcacagatggaggtcaccatgaaggccctgggcagcaatgatccgatgcagtccatattaaacagcttagaacaacagcatgaagaagaaaaacgatctgcactggagcgccagaggcttatgtatgagcacgaattggagcagctccggagaaggctgtctcctgagaagcagaactgccggagcatggacaggttttctttccactcgcccagcgctcagcaacgcttaagacagtgggctgaggagagagaagcaacgttgaataacagcctgatgaggctgagggaacaaattgttaaggccaatctattggtgagagaagctaattacattgctgaggagctggataaaagaacagaatacaaagttaccctacagattccagcctccagcctggatgccaacaggaagcgaggctctcttcttagtgagcctgcaatccaggtgagaag

SEQ ID NO: 156 - DNA, 488 bp, Homo sapiens
  misc_feature: Incyte ID No: LG:233933.5:2000MAY19
ctccacgccagcacttttgcatgcagtactcccttcaggtcgtcacagccacctgcaagtttgggatgaatgcgcttctcctgtctgcctggttcggccacttacgaatcctccagatcttggtaaactcaggggccaagatccactgtgagagcaaggaggggaacactgcccttcatctggctgctggtcggggccatatggctgtgctgcagcgacttgtggacatcgggctggacctggaggagcagaatgcggaaggtctgactgccctgcattcggctgctggaggatcccaccctgactgtgtgcagctcctcctcagggctgggagcaccgtgaatgccctcacccagaaaaacctaagctgccttcactatgcagccctcagtggctcggaggatgtgtctcgggtcctcatccacgcaggaggctgcgccaacgtggttgatcatcagggtgcctctcctctgcacctcgctgtgagg

SEQ ID NO: 157 - DNA, 5106 bp, Homo sapiens
  misc_feature: Incyte ID No: LI:290344.1:2000MAY01
gggaagtgggagagacagagggagagtgtgcatacagcagctgtcgggcatccctgtctcagggacttcttcgctgattcacagaggcagcccagccccggcctcccagcttacagctgccgcctgcttctcagaacctgacggaatcagaagctacatgatattcgccgtgtgagtggctatcgtaatagataacatttgaatatctactaaatgccagaaactatgaattaactcctctcaacaaagctaagaggtgcttgatgatcaatagttggtgcactgcctatcctcatcccccccatgagccttggtttttatgcaacctatggtcatgcagggatgcccttacaccctcccacgatgtcatgactggcaggcagctgaccagttccatcatagcagcagcctccgaagcacctgcccccaccctcaggttagagctgctgtcaccagccctgcacctcctcaagatggtgctggggttccctgcctaagcctaaagctgttgaacgggtctgttggtgcctctggacccctggaaccaccagccatgaatctgtgttggaatgaaataaaaaagaagtctcacaacctccgcgctcgcctagaggccttctcagaccacagtggaaagcttcagctccctcttcaagagattattgactggctcagccaaaaggatgaggagttgtcagctcagctgcccctacagggggatgtggccctggtgcaacaggagaaggagacacatgcggcctttatggaagaagtcaagtctcgggccccctacatctattctgtgctggagtcagctcaggccttcctgtcccagcacccatttgaggagttagaggagcctcattctgagagcaaagatacctccccgaaacagcggatccagaatctcagccgctttgtatggaagcaggcgacggtggccagtgaactgtgggagaagttgacagcccgctgtgtggaccagcaccgtcacattgagcggactctggagcagctcttggagattcaaggggcaatggaggaactaagcactactctaagccaagctgagggagtccgagccacttgggagcccattggggatctcttcattgattcactcccagagcacatccaggctattaagctgttcaaagaagaattctcccccatgaaagatggagtaaagttggtgaatgatctggcccaccaacttgccatttctgatgtgcacttgtcaatggagaattcccaggccctggaacagatcaacgtccgatggaaacaactacaggcgtcagttgatgagaggcttaagcagctccaggatgcccaccgggactttgggcctgggtcacagcactttctctcctcctctgtccaggttccctgggaaagagcaatttcacccaataaagttccctactacatcaaccaccaggctcagaccacatgctgggaccatcccaagatgacagagttataccaaaccctagctgatctgaacaacattaagttctcagcttatcgcactgccatgaaactccgcagagtccagaaagccctgcgcttggacctggtaactttaaccacagccctggaaatcttcaatgagcatgatctgcaggccagtgagcacgtgatggatgtggtagaggtcattcactgcctgactgccttatatgaacgtttggaggaggaaagaggcatcctggtcaatgtgccactctgtgtggacatgagcctcaattggctcctcaatgtttttgatagtggtcgcagcggaaagatgcgggcattgtcttttaagactggcattgcatgcttgtgtggcacggaagtgaaggaaaaacttcagtacctcttcagccaagtggccaactcaggcagccagtgtgaccagcgccaccttggtgtcctgcttcatgaggccattcaggtgccccgtcagctgggtgaagtggcagcctttgggggcagcaatgtggagcccagtgtccgtagttgcttccgttttagcaccgggaagccagtcattgaagcatcccagttcctggagtgggtcaacctggagccccagtccatggtgtggctgcctgttctgcatcgggtaaccattgctgagcaagtgaagcatcagaccaagtgctctatctgtagcgcagtgccccatcaaggggttcaggtaccggagtctgaagcaattcaacgttgacatctgccagacctgcttcttgacaggcagggccagcaaaggcaattaagctgcactaccccatcatggcagtattacacaccgaccacatccagtgagaacatgagggactttgccacaaccttaaagaacaaattccgctccaagcattatttcagcaaacaccctcagcgaggttatctgcctgtgcaatcagtgctggaggctgactacagtgagacgccggcttcttccccgatgtggccacacgccgacacacactcccgaattgagcattttgccagcaggcttgctgagcatggaaagtcaaaattgctccttctttaatgaaaggttgttccccaattgaaagcttaaacgaggaccagtacctgctgcggcactccagccccatcacagaccgggagccagcctttggacagcaggctccatgcagtgtgggcacagaaagcaaaggggagctacagaagatcctggcccacttggaagatgagaaccggattctccagggagagctgaggcgcctgaagtggcagcatgaggaggcagctgaggcacccagtctggctgacggctccactgaggcagcaacagaccaccgcaatgaggagcttctggccgaggcccgtatccttcggcaacataagagccgcctggagacgcgcatgcagatcctcgaagatcacaacaagcagctagagtccccagctgcagcgtcttgagggagcttcttcctgcagccacccaccgaatcagatggcagtggctctgcaggctcgtccctagcttcctctccacagcagtcagaaggccagtcacccccgggagaagggacagactactccagataccgaggctgcatgatgatgtggggtcaaagagccaggatgtcagcctgtgcttggcggacatcatggagaaactccgtcatgccttcccccagtgtgcgaagttctgatgtgactgcgcaacaccctgctggcctcttgatggagccagatccccatcctatagttcatagtcctctcctggttccgggtcaaagcctttcctcaaggcttcacccaacctttcccagtttccacctggccccacattcctcaactagtattatttgggcatctgggcagcagcagggatctggtggtatgtgaggtgcatgcgggcagtgatgggagaaggggagcgcatgattctttcttgaccctagaaagtgttccctttaatcttcaagttcgagatcagccctttaagtacctttctgttgcagcccagggcaaatatcacttggccatttcagatggggagcagagaagcctgccttgcagaagctaagcggtacatgttggcccctcttccttctccgtgggaattatggaaagagagaagcctaattaccgccaaggttccatccagcattatgaatccaacagggttttacccctactctctggcgcaactcagggaggcaaaagggtatcccccgagacaccttccccacccccaagtggcccctgaaaaagtctgggcagtgtgtgtactattaacttcagctccagggacaggattgctagccatcctaatgctacctaggtataggtttctcctcaaatatcttcattttctttagcctcagtccctgacagaccttccttaagggggagaacagttcattctgggttcttctaccgttatatttggaagcattaaatccatacttatgggtttagaatgtttgtttttgccggcacatgtgtcctatttcgttaaagtcctcagcattttgagaggagcccactgagttgcgagttgctctggaaacctggctgaagccacccttgtgctcctctgagtctgtgcctcagcagacctgaggacacagtggccagcttgcgttgagcaagggagtgtggctttcctgtgggtaaggaagaggaagcccacctcaagtcttggaagtagttatgacctgccatgcccacaaccgcttcccaaggctgtgacccctttctagcttctcaggctgaatcaggtgaaggtggctgatttgtccccagctaatcataaggcatttgcaactggctaccgtgtgtagtggcccctccataggagccacaggccacaaatcaggaagcgtggccactttccagccagacaacaacagcaaggccttcctgtgcctaaaattgttatttctaactctggaaggtgaatccaatcctcaaactgaactagctcttcctaggcgacatataccatgatctctttatccagaaactgttcagaatagatagtaggggtgggggagtgggcttgggaatgttgaatagattcagagcccacttaggcagctttctcccaagaggagctttataacctagagccctgcagttgacttcatttgcctaagtttatatacatacatatctattctacatatctactgtacatcagtgctctcctggcctcactcacacattaaattctaatacctcttgaagtattaatgttctgccttgctctttgttagccccagcctctggttggaaagatagatgtatcctggctgctcccctaggatatctctctccattgatgtttggcggtgggctgtcctcaagaccaaagcaacaggaaacctgtggtcacagagaatctaacaggaagagtcactgttctcttcactcattccaaatcttgttcccttgagacctgggccttgggtgaattttcctgggctccccataaatggttcaggtgccaacaatagagcaaacccaagctctgcccaccccatgcagcaaaaggacaaacaggccttcattagcctttgccagctaagacacagagaacatcctctggctcccttccagactcttatggtctcactc

SEQ ID NO: 158 - DNA, 3800 bp, Homo sapiens
  misc_feature: Incyte ID No: LI:410742.1:2000MAY01
  unsure 3787: a, t, c, g, or other
agaccatctgtagactccttcggaaagcagcagagatgctgcagagggtttttcttagacattaactgcagacggctgtcaggatagaagcagcggctcacttggactttttcaccagggaaatcagagacaatgatggggctcttccccagaactacaggggctctggccatcttcgtggtggtcatatcggttcatggagaattgcgaatagagactaaaggtcaatatgatgaagaagagatgactatgcaacaagctaaaagaaggcaaaaacgtgaatgggtgaaatttgccaaaccctgcagagaaggagaagataactcaaaaagaaacccaattgccaagattacttcaggatacccaaccaacccagaaaatcacctaccgaatctctggagtgggaatcgatcagccgccttttggaatctttgttgttgacaaaaacactggagatattaacataacagctatagtcgaccgggaggaaactccaagcttcctgatcacatgtcgggctctaaatgcccaaggactagatgtagagaaaccacttatactaacggttaaaattttggatattaatgataatcctccagtattttcacaacaaattttcatgggtgaaattgaagaaaatagtgcctcaaactcactggtgatgatactaaatgccacagatgcagatgaaccaaaccacttgaattctaaaattgccttcaaaattgtctctcaggaaccagcaggcacacccatgttcctcctaagcagaaacactggggaagtccgtactttgaccaattctcttgaccgagagcaagctagcagctatcgtctggttgtgagtggtgcagacaaagatggagaaggactatcaactcaatgtgaatgtaatattaaagtgaaagatgtcaacgataacttcccaatgtttagagactctcagtattcagcacgtattgaagaaaatattttaagttctgaattacttcgatttcaagtaacagatttggatgaagagtacacagataattggcttgcagtatatttctttacctctgggaatgaaggaaattggtttgaaatacaaacgtgatcctagaactaatgaaggcatcctgaaagtggtgaaggctctagattatgaacaactacaaagcgtgaaacttagtattgctgtcaaaaacaaagctgaatttcaccaatcagttatctctcgataccgagttcagtcaaccccagtcacaattcaggtaataaatgtaagagaaggaattgcattccgtcctgcttccaagacatttactgtgcaaaaaggcataagtagcaaaaaattggtggattatatcctgggaacatatcaagccatcgatgaggacactaacaaagctgcctcaaatgtcaaatatgtcatgggacgtaacgatggtggatacctaatgattgattcaaaaactgctgaaatcaaatttgtcaaaaatatgaaccgagattctactttcatagttaacaaaacaatcacagctgaggttctggccatagatgaatacacgggtaaaacttctacaggcacggtatatgttagagtacccgatttcaatgacaattgtccaacagctgtcctcgaaaaagatgcagtttgcagttcttcaccttccgtggttgtctccgctagaacactgaataatagatacactggcccctatacatttgcactggaagatcaacctgtaaagttgcctgccgtatggagtatcacaaccctcaatgctacctcggccctcctcagagcccaggaacagatacctcctggagtataccacatctccctggtacttacagacagtcagaacaatcggtgtgagatgccacgcagcttgacactggaagtctgtcagtgtgacaacaggggcatctgtggaacttcttacccaaccacaagccctgggaccaggtatggcaggccgcactcagggaggctggggcctgccgccatcggcctgctgctccttggtctcctgctgctgctgttggccccccttctgctgttgacctgtgactgtggggcaggttctactgggggagtgacaggtggttttatcccagttcctgatggctcagaaggaacaattcatcagtggggaattgaaggagcccatcctgaagacaaggaaatcacaaatatttgtgtgcctcctgtaacagccaatggagccgatttcatggaaagttctgaagtttgtacaaatacgtatgccagaggcacagcggtggaaggcacttcagggaatggaaatgaccactaagcttggagcagccactgaatctggaggtgctgcaggctttgcaacagggacagtgtcaggagctgtttcaggattcggagcagccactggagttggcatttggtccctcaggccagtctggaaccatgagaacaaggcattccactggaggaaccaataaggactacgctgatggggcgataagcatgaattttctggactcctacttttctcagaaagcatttgcctgtgcggaggaagacgatggccaggaagcaaatgactgcttgtggatctatgataatgaaggcgcagatgccactggtgggtgctgtgggctccgtgggttgttgcagttttattgctgatgacctggatgacagcttcttgggactcacttggacccaaatttaaaaaacttgcccagagataaagccccttttggttgtttttgaaattgggttgaaggcaaagaagttcagcccccaccccccttgctaaagaccagcggttatgggattgagatcctgtggggcatcccatataaaagtccagcagacaggatttggtaagttgccaaactttgtcaggaagtctaagggagcttcgtgtttggtccgcctctgggtcctgtccagccaagctggtttcccaattcccttaaccttctggagcatggtaactactttagttaacgggagatttatctccggcttcttggttccctcggcgcaaccgttccagctgcaggcttttgatcccactgtctccacacgagaatgtgaaaagtgccagaaaaagggtgactctgtcgccagtttcccagtgtctccgtggccaacctaagctgggcccaacgcagctacgaggcgtcacattactatgctccggtacagaggatccttgctcccgtctaatatgaacccagaatgagcgtggagatatccacactggagccaaattctggggatcttgtgggagctaaagtattcaaacatatgcatagcaaacgctcacgtgtatttgggctaataatttggccacttattagcttctctcataaaatggattcacgattataaattaaatgttctgggttcatacccgcaaaagccccataatgttgtcactccctaattctcacaggtacttattcaaacttgttagtaaatccttaaaggtttttcacaaacccctcaaatctatattccgccacgcgaaattgttccgtaaacagttcttaagcccttctcatttttcccccctgccccaacggaaggtgttttaatcacttttaaaaatgcaaatagtgaattttagtgggagttaaggcaggtagcgctgggttcattgtcgtccaattgcctgtttctgtatatgcagttgatacatgatggtaaggaatcaacaaaggggcccgggcgccggtggctcacagccatgtaatcgccagcacttgtgggaggccagaggcaaggtggatctatgaggtctaggagatncgagaccatcctg

SEQ ID NO: 159 - DNA, 2281 bp, Homo sapiens
  misc_feature: Incyte ID No: LG:406568.1:2000MAY19
  unsure 446, 875, 1361: a, t, c, g, or other
cagcctgccacttgcctccctgcctgcttctggctgccttgaatgcctggtccttcaagctccttctgggtctgacaaagcagggaccatgtctacctttggctaccgaagaggactcagtaaatacgaatccatcgacggaggatgaactcctcgcctccctgtcagccgaggagctgaaggagctagagagagagttggaagacattgaacctgaccgcaaccttcccgtggggctaaggcaaaagagcctgacagagaaaacccccacagggacattcagcagagaggcactgatggcctattgggaaaaggagtcccaaaaactcttggagaaggagaggctgggggaatgtggaaaggttgcagaagacaaagaggaaagtgaggaagagcttatctttactgaaagtaacagtgaggtttctgaggaagtgtatacagangaggaggaggaggagtcccaggaggaagaggaggaagaagacagtgacgaagaggaaagaacaattgaaactgcaaaagggattaatggaactgtaaattatgatagtgtcaattctgacaactctaagccaaagatatttaaaagtcaaatagagaacataaatttgaccaatggcagcaatgggaggaacacagagtccccagctgccattcacccttgtggaaatcctacagtgattgaggacgctttggacaagattaaaagcaatgaccctgacaccacagaagtcaatttgaacaacattgagaacatcacaacacagacccttacccgctttgctgaagccctcaaggacaacactgtggtgaagacgttcagtctggccaacacgcatgccgacgacagtgcagccatggccattgcaganatgctcaaagtcaatgagcacatcaccaacgtaaacgtcgagtccaacttcataacgggaaaggggatcctggccatcatgagagctctccagcacaacacggtgctcacggagctgcgtttccataaccagaggcacatcatgggcagccaggtggaaatggagattgtcaagctgctgaaggagaacacgacgctgctgaggctgggataccattttgaactcccaggaccaagaatgagcatgacgagcattttgacaagaaatatggataaacagaggcaaaaacgtttgcaggagcaaaaacagcaggagggatacgatggaggacccaatcttaggaccaaagtctggcaaagaggaacacctagctcttcaccttatgtatctcccaggcactcaccctggtcatccccaaaactccccaaaaaagtccagactgtgaggagccgtcctctgtctcctgtggccacacctcctcctccncgggactcctccactcccagagaaaaagctcattaccagaaacattgcagaagtcatcaaacaacaggagagtgcccaacgggcattacaaaatggacaaaaaaagaaaaaagggaaaaaggtcaagaaacagccaaacagtattctaaaggaaataaaaaattctctgaggtcagtgcaagagaagaaaatggaagacagttcccgaccttctaccccacagagatcagctcatgagaatctcatggaagcaattcggggaagcagcataaaacagctaaagcgggtggaagttccagaagccctgcgataaaaacatgatctttagaagaggatgcagaactgttcagtggtattacatgaaatgcattgtgagatgtttctaaaataccttcttcaattcaaaatgatccctgactttaaaaataatctcacccattaattccaaagagaatcttaagaaacaatcagcatgtttcttctgtaaatatgaaaataaatttcttttttatgtcgtgagatttgtattggcaagaagcagttaatttaaagatgctcttcctatctgtggatgtgttggtaactccgagttgtaatgagttcatgaaatgtgctgttatttttgtaatctcaataaatgtggattgaagttttttccctttttttaaagccaaactaatatttttctgtgacttgatacatctgtcagatttttgtaatctcgataaatgtgtattgaagttttttccctttttttaaaaagccaaactaatatttttctgtgagttaatacatctgtcaggtgtgtatgtaacattactggacattaaaaaaaattattacattctcacccaaaaagggtttgggtcctaagcatttgcctttctttgtttcctcttgttcaagaaaatctgattaga

SEQ ID NO: 160 - DNA, 5408 bp, Homo sapiens
  misc_feature: Incyte ID No: LI:283762.1:2000MAY01
  unsure 4004: a, t, c, g, or other
gcgagcgcggtcgagatcgccatgcctacccgagtatgctgctgctgttccgctttgcgtcctcgctacaaacgcctggtggacaacatattccctgaagatccaaaagtaatttgatctacatctactgatccttctctttgctgacccattctgccccccgctgacctccttaaggatggccttgtgaaaactgatatggagaaattgacattttatgcagtatctgctccagagaaactggatcgaattggttcttacctggcagaaaggttgagcagggatgttgtcagacatcgttctgggtatgttttgattgctatggaggcactggaccaacttctcatggcttgccattctcaaagcattaagccatttgtagaaagctttcttcatatggtggcaaagctgctggaatcgggggaaccaaagcttcaagttcttggaacaaattctttggtcaaatttgcaaatattgaagaagacacaccatcctactcacagacgttatgacttttttgtgtctcgattcagtgccatgtgccattcctgtcatagtgatccagaaatacgaacagagatacgaattgctggaattagaggtattcaaggtgtggttcgcaaaacagtcaacgatgaacttcgggccaccatttgggaacctcagcatatggataagattgttccatccctcctgtttaacatgcaaaagatagaagaagttgacagtcgcataggccctccttcttctccttctgcaactgacaaagaagagaatcctgctgtgctggctgaaaactgtttcagagaactgctgggtcgagcaacttttgggaatatgaataatgctgttagaccagtttttgcgcatttagatcatcacaaactgtgggatcccaatgaatttgcagttcactgctttaaaattataatgtattccattcaggctcagtattctcaccatgtgatccaggagattctaggacaccttgatgctcgtaaaaaagatgctccccgggttcgagcaggtattattcaggttctgttagaggctgttgccattgctgctaaaggttccataggtccgacagtgctggaagtcttcaatacccttttgaaacatctgcgtctcagcgttgaattcgaaagcaaatgattacagggggggatctgtagccagtgtcaatttaaattacaagttccaaagacaatgatgagaagattgtggcagaatgctatcatccaaacaataggattttttggaagtaacctaccagattatcagaggtcagaaatcatgatgttcattatggggaaagtacctgtctttggaacatctacccatactttggatatcagtcaactaggggatttgggaaccaggagaattcagataatgttgctgagatctttgcttatggtgacctctggatataaagcgaagacgattgttactgcactgccagggtctttcctggatcctttggttatcaccatctctcatggaggactacgaactgagacagttggtcttggaagtaatgacataatatcatggatcgtcatgacaatagggaaaagcttcgagggataagaataataacggatgtagctgacctaaagataaaaagagaaaaaatttgcagacaagacacaagtttcatgaaaaagaatgggcaacagctgtatcgggcacatatatttgggttgtaaagaggaagacaacgttcagaaaaactatgaactactttatacttctcttgctcttataactattgaactgggctaatgaagaagtagttattgatctcattcgacctggccattgcttttacaggacagtgcaattatcaatgaggataatttgccaatgttccatcgttgtggaatcatggcactggttgcagcatacctcaactttgtaagtcagatgatagctgtccctgcattttgccagcatgttagcaaggttattgaaattcgaactatggaagccccttattttctaccagagcatatcttcagagataagtgcatgcttccaaaatctttagaggaagcatgaaaaagatttgtactttctgaccaacaagattgcagagtcgctaggtggaagtggatatagtgttgagagattgtcagttccgtatgtaccacaagtaacagatgaagatcgactttctagaagaaaaagcattgtggacaccgtatccattcaggtggatattttatccaacaatgttccttctgatgatgtggttagtaacactgaagaaatcacttttgaagcattggagaaagccattggataccagtggaatggaagaacaggaaaaggaaaagaggcgtcttgtgatagagaaatttcagaaagcaccttttgaagaaatagcagcacagtgtgaatccaaagcaaatttgcttcatgatagacttgccccaaatattggaactcaccatacgtcctcctcccagtccatcaggaacactgaccattacttctgggcatgcccaataccaatctgtcccagtctatgagatgaagtttccagatctgtgtgtgtactgatcggcgcatgaagacctcaggatatgatttgtaaagcctaaaaattaaggccaagctgagctttcagggtttacttaatgtgtattaacatacttcttgaaaataatgatggaacatatctttaaccaaatgtttggcataccatattagaagttttggagctatatataatttcgagtactttcaaagatagatttatgccatgttaatttgctttgaggttcctgttgcctttttaagttgaacatgttttggtttcactttattccactgttaagtagtatgttttaaacttttcacaaaatgtaatgttttttaaaaagtaagccttcagaggattgaaactggattaattggttatttcttaaacatttaaacaggcggtttagatgtagaatttttgttgttgttttctgcaaaggcagatacatttaaatatattcctagtcctgggggctgcaaaactgttcggtgggctttttgtccccagtgcgttagataagctggcgataggcaccttgctattcagttactataataatatgtgataggcattcctcatcttcttcacaataataggacatctgttgaatagcattcctcgaatataaccctaaaaacgccatactttaaattgtctggttcttgtaatattgtgtttcctgccacagagtttggaccattctgcttgagaagtgtagcagcttactcttggagtaccaaactgtgcaatattttttacatcataagatgtatacagtttacaggctgtgcttcgaaattcatagtagtattttgctgtggctccattaattaaatgagatatcatatttagtgcagaaaacagacatttacaacagctattcaagttcacctgtgaaggagtctgtacattttgatttctattaagagcacatttatttacatttgtatattatttgaaatcctcatactcaaaaaattctccagatgggacttttaatttgtaaggatttgaactgtgacttgtatacatctgtttaggaatcaattatatttgaaaagctgcctgtgttttaacagtcaagtgtgctaaagtttgtcaatttaaggctggcttttgatttcagctaccaagatcacaggtgcactctacacataacactggacaggacccataacattacatacatcttaggtggaattctatcacatgggtaaaatggaacggctttctttgtaactcataaaattctcttaggacatttttataaagtcacctgtttatagttctatcttttcagattccatttctttttacataaaacagcatacatatgcaaaaactgtaaccttagaatccagtttaatttttgggctttgtttttggtttaaaaaaattgcagtgaagaatggggatgtttgtgtttatgggctatttggggcaccttttagntaggaaacagacaaaagtaaggacaacgataataggacaaggcatacttgaaaatttctggaatacttaaacaaaagcgcaacatcttggaaaaccagtctagtcattgaaacctatgaaatgacactgaaagatcctggggctgcttcttaaataagtagatccagcaagacttgtttccagagtgaacagtgggagtcgttaccgctggaggactaaagggccctgtgggcagctgtcactggaactttgcctcttgatcaggaaaaatgcttcaccagtccgtaaagccaagttgtattttttttattgccctttttttccttctgtatttttaaagaaggatgttaatttttgacctatatattttaaaaaaatctaagcagggggacatgcaaaaacaatcatccacccacttgggatgtcatttttatagattaacactgtgtgcttttgtatggaaaaaatatatataatttaatagtataaaacataacatatatattcatttgcacttacgtgaaacacaaactttgctctacaaaatttcgtgtttcttaggtgattttaaaaatgcatgtattgcatgtaaaggaaaacccattaccaattaatgtttaatccacacctttatccttggtctttgttggatttggggttttgttgggggtttttgttactgtttttaaattacagtaggcttcctatatacccctggatttctgaactggtcttgttgacaaggattcccaagaaatggatcttatcaactggctgactctcccatatctgcaagacccattctgcaggaactgggtcgtgcacacggtgttgtagccagttcaggtactgaatatttaggatttggtgaagttcactgtattgctatatttttgtaagataaataaaactcaattaaattgttaatccattctcttttttgctgtatagaattgcttatatcactctttctttcatgacattggttaacatttaaatgttcctcctgtacttgtgttgtcctgtgacccgccttatagagttttattgttattggtgtttaccctgaataccctatgccgtacacacacacatatttccttaatacttctgaactcattatcttttagaataataatacctacctacactttacccagcaattaacttcctcccctaccccaaaatgtttttccttccctgtctgaaaatggaactaatttgtcttattcgtgcttatatctgtattaaaatgcaataaaggttagttttttgaaatgtaaaatttccactgtgcaatttcatatgtcagcaaataaaccatagattatttgtatataagttcatttttatagctattgttacatttaattaaatttattcaatatttgcttaaattaaaaa

SEQ ID NO: 161 - DNA, 2895 bp, Homo sapiens
  misc_feature: Incyte ID No: LI:347687.113:2000MAY01
agccaaccttacttacagcataagggagcgtagaatctgtgtagacgaagggggcatctggccttacacctcgttagggaagagaaacagggtgttgtcagcatcttctcactcccttctccttgataacagctaccatgacaaccctgtggtttccaaggagctgagaatagaaggaaactagcttacatgagaacagactggcctgaggagcagcagttgctggtggcactgttctgtggctgtggacatgaagccctcactggcacagaaaagctaattgagacctatttctccaaaaactaccaagactatgagtatctcatcaatgtgatccatgccttccagtatgtcatctatggaactgcctctttcttcttcctttatggggccctcctgctggctgagggcttctacaccaccggcgcagtcaggcagatctttggcgactacaagaccaccatctgcggcaagggcctgagcgcaacgtttgtgggcatcacctatgccctgaccgttgtgtggctcctggtgtttgcctgctctgctgtgcctgtgtacatttacttcaacacctggaccacctgccagtctattgccttccccagcaagacctctgccagtataggcagtctctgtgctgacgccagaatgtatggtgttctcccatggaatgctttccctggcaaggtttgtggctccaaccttctgtccatctgcaaaacagctgagttccaaatgaccttccacctgtttattgctgcatttgtgggggctgcagctacactggtttccctgctcaccttcatgattgctgccacttacaactttgccgtccttaaactcatgggccgaggcaccaagttctgatcccccgtagaaatccccctttctctaatagcgaggctctaaccacacagcctacaatgctgcgtctcccatcttaactctttgccttgccaccaactggccctcttcttacttgatgagtgtaacaagaaaggagagtcttgcagtgattaaggtctctctttggactctcccctcttatgtacctcttttagtcatttgcttcatagctggttcctgctagaaatgggaaatgcctaagaagatgacttcccaactgcaagtcacaaaggaatggaggctctaattgaattttcaagcatctcctgaggatcagaaagtaatttcttctcaaagggtacttccactgatggaaacaaagtggaaggaaagatgctcaggtacagagaaggaatgtctttggtcctcttgccatctataggggccaaatatattctctttggtgtacaaaatggaattcattctggtctctctattaccactgaagatagaagaaaaaagaatgtcagaaaaacaataagagcgtttgcccaaatctgcctattgcagctgggagaagggggtcaaagcaaggatctttcacccacagaaagagagcactgaccccgatgggcgatggactactgaagccctaactcagccaaccttacttacagcataagggagcgtagaatctgtgtagacgaagggggcatctggccttacacctcgttagggaagagaaacagggtgttgtcagcatcttctcactcccttctccttgataacagctaccatgacaaccctgtggtttccaaggagctgagaatagaaggaaactagcttacatgagaacagactggcctgaggagcagcagttgctggtggctaatggtgtaacctgagatggccctctggtagacacaggatagataactctttggatagcatgtcttttttctgttaattagttgtgtactctggcctctgtcatatcttcacaatggtgctcatttcatggggtattatccattcagtcatcgtaggtgatttgaaggtcttgatttgttttagaatgatgcacatttcatgtattccagtttgtttattacttatttggggttgcatcagaaatgtctggagaataattctttgattatgactgttttttaaactaggaaaattggacattaagcatcacaaatgatattaaaaattggctagttgaatctattgggattttctacaagtattctgcctttgcagaaacagatttggtgaatttgaatctcaatttgagtaatctgatcgttctttctagctaatggaaaatgattttacttagcaatgttatcttggtgtgttaagagttaggtttaacataaaggttattttctcctgatatagatcacataacagaatgcaccagtcatcagctattcagttggtaagcttccaggaaaaaggacaggcagaaagagtttgagacctgaatagctcccagatttcagtcttttcctgtttttgttaactttgggttaaaaaaaaaaaaaagtctgattggttttaattgaaggaaagatttgtactacagttcttttgttgtaaagagttgtgttgttcttttcccccaaagtggtttcagcaatatttaaggagatgtaagagctttacaaaaagacacttgatacttgttttcaaaccagtatacaagataagcttctatgcagcctggaaggaggagagggaaaatgttttgtaagaaaccaatcaagataaaggacagtgaagtaatccgtaccttgtgttttgttttgatttaataacataacaaataaccaacccttccctgaaaacctcacatgcatacatacacatatatacacacacaaagagagttaatcaactgaaagtgtttccttcatttctgatatagaattgcaattttaacacacataaaggataaacttttagaaacttatcttacaaagtgtattttataaaattaaagaaaataaaattaagaatgttctcaatcaaaaaaaa

SEQ ID NO: 162 - DNA, 561 bp, Homo sapiens
  misc_feature: Incyte ID No: LI:1146510.1:2000MAY01
tgcataaaaagcagagcgtagcaagtaagctgcaaatctgaagaaaatccatgtgtccaccagctgccatctccagaactcttactccaggaaatccgaaagagtgaacattcttttagtctcctactcctcaattaagtaaatgagaatgagtcagccaacaaagttcatgacaacaaggtgcaggatggtgctggcaaagagaaaatcagcaaaggctcgctctggggagatgccttggaaatccgctttgttctctgggttgactctgtaattacatcacggccataccgctaggatgaactccccacacaagagatgaagcccgagagaaaagtagttgaacgagcggaatggtccccagcgacggagacagtgaaccgaactgcagcgccccaggtcagccagtatatacagcaggtacgcgtccagcaacttcagacgctgcggagtggagctcaagtactcttctaagaaccgcgaaatgacagacactaccgacgccgtacataactgcaacgcaaggtactccagtccgcgccccaaactcttggaggaccc

SEQ ID NO: 163 - DNA, 630 bp, Homo sapiens
  misc_feature: Incyte ID No: LG:451710.1:2000FEB18
gttcgtccgctagggttttagcccggtaccccgaatcccgctcctccgccgcctcgcgtccacccttcctcttggcgcgctccgatccaagagatggcggtgccgctgctgacaaagaagatcgtgaagaagcgggtcaagcagttcaagaggccccatctcgaccgctataagtgccttaagccaagctggcgcaggccaaagggtattgactcccgtgtcaggaggaagttcaagggatgcaccttgatgcccaacattggttacggctctgacaaatcaaccaggcactacctccccaataagttcaagaagtttgtggtgcacaatgtctctgagctggagttgctcatgatgcacaacagaacctactgtgccgagatcgcccacaacgtttcaaccaagaagcgcaaggagattgttgaacgtgccgcgcagctcgacattgtggtcaccaacaagctcgccaggctccgcagccaggaggatgagtagtctggtttcttgtcataacggccaactagatcctgccattcccggctgtaggaaactactctgctttgtgccttgttggtacttagaataccagtcattttctacatttttggtaccagtagcgacttctatgtg

SEQ ID NO: 164 - DNA, 570 bp, Homo sapiens
  misc_feature: Incyte ID No: LG:455771.1:2000FEB18
ccgcttcttgcagccgtcgccgcgaagcgctccagagaacttccgtcaacatggggaagacacgtggtatgggagccgggcgcaagctcaagacccaccgcaggaaccagcggtgggctgacaaggcatacaagaagagccatttgggcaatgagtggaagaaacccttcgctgggtcatcccatgccaagggcattgtcctggagaagattggtattgaggccaagcagcccaactccgctatccgtaagtgtgctcgtgttcagcttgttaagaatggcaagaagattgctgccttcgtgccaaatgacggttgtttgaactacattgaggaaaatgatgaggtcttgattgctggatttggtcgtaaggggcacgctgtgggagatattcctggtgtccggttcaaggtcgtcaaggtttccggtgtgtctctgcttgcccttttcaaggagaagaaagagaagccaaggtcttagattgctcttgctaccaaaatcagcaagcgtggagttgaaacgggagggcgttagatgattaagaagaatggttgcattgctatgtttgcag

SEQ ID NO: 165 - DNA, 821 bp, Homo sapiens
  misc_feature: Incyte ID No: LG:452089.1:2000FEB18
ttacacgtcgtgactgggaaaacaccgtcgtccgccgccgccgaaggacggaaggagaagagggtacggccgtctcctcgcccccatggcccacgagaagaagctgtccaacccgatgcgggagatcaaggtgcagaagctcgtcctcaatatctccgtcggggagagcggcgaccgtctcacccgcgccgcaaaggtgctcgagcagctcagcggccagacccccgtcttctccaaggcgaggtacacggtgcggtcgttcggcatccggcgtaacgagaagatcgcctgctacgtcacggtgaggggcgagaaggccatgcagctgcttgagagcggcctcaaggtcaaggagtacgagctgctcaggaggaacttcagcgacaccgggtgctttggtttcggcatccaggagcacatcgaccttggtatcaagtacgatccttcaacaggcatctacggaatggacttctacgtcgtgctggagcgtgcgggctaccgtgtggcacgccgcaggaggtgcaagtcccgcgtcgggattcagcacagggtgaccaaggaggactccatgaagtggttccaggtcaagtacgaaggcgtcatcctcaaacaaggctcaggcctacacgtcccccccctcacctgtgggcaaaacagctctctggtctcttctcctcctccgtgtcaacgcaagaccaccacccacctcgccaggcttttttgggtttaatttgtgttctcagacctgatgatttagtctgctagcactctgtgggatgctgttgtcgcaagatcaccaccatgtcaaattagttccgtgc

SEQ ID NO: 166 - DNA, 503 bp, Homo sapiens
  misc_feature: Incyte ID No: LG:246415.1:2000FEB18
tgcttcctccagtccgtgcctccaatatgatgaaaaaaagaaggaacaacggtcgtaccaaaaagggccgcggccacgtgcagcctatttgcgacacgaactgtgcccaatgtgtgcccaaggacaaggctattaacaaattcatcattggaaacacagtggaggctgcagcagtcagggacatttctgaagcgagcgtctttgatgcctatgtgcttcccaagctgtatttgaagctacattactgtctgagttgtgcaattcacagcagagtagtcaggaatcgatcttgtgaagcccacaaggactgaacacccctactccaatttagacctgcggatgctgccccacaacccccaccaaagcccacgtaaggagttgagtccttaaagtctgaagacggactattctcattgagaaaaataaaatggaaattgtaccttaattaaaaaatacaaaaagtagccatgagtggtgacatgcaccatgtggtcccagctaca

SEQ ID NO: 167 - DNA, 753 bp, Homo sapiens
  misc_feature: Incyte ID No: LG:414144.10:2000FEB18
ctgcaccactagaaagatggcggagcaagagcaaagaaaaatccctttggttccagaaaatctcctgaaaaagaggaaggcttatcaagccctcaaagccacccaggcaaagcaggcacttttggcaaagaaggagcagaagaaaggaaaagggctcaggtttaagcgactggaatcattcctacatgattcctggcggcagaaacgtgacaaggtgcgtctcagacgactagaagtgaaacctcatgccttggaattgccagataaacattccttgggcctttgttgtacgcatcgaaaggattgacggcgtgagtttactggtgcagagaactcattttgaaacgtggacaagccaaggtcaagaataagaccatccctctgacagacaatacagtgattgaggagcacctggggaagtttggcgtcatttgcttggaagacctcattcatgaaattgccttcccagggaagcatttccaggagatctcatggttcttgtgccctttccacctctcagtggcccgtcatgctaccaaaaatagagtgggcttcctcaaggagatgggcacacctggctatcggggtgaacgcatcaatcagctcatccgtcagctgaactagacccaggtgccaaactgcggtaaattttttatcagtgaagtggaagcatgtgttttgttttggaaatttttatcaagtatcttcagagaagattatttcctgctttatcttcagaaactggaaagggtc

SEQ ID NO: 168 - DNA, 885 bp, Homo sapiens
  misc_feature: Incyte ID No: LG:1101445.1:2000FEB18
  unsure 754, 809, 855, 866: a, t, c, g, or other
ctggaaccatggaggctgtaccagagaagaaaaagaaggttgccgctgcgccaggaacccttaagaagaaaaaggttcctgcggtgccagaaacccttaagaaaaagcgaaggaatttcgcagagttgaaggtcaagcgcctgaggaagaagtttgccctgaagacactgcgaaaggcaaggaggaagctcatctatgagaaggcaaagcactatcacaaggagtacagacagatgtaccggactgagattcgcatggctaggatggcgaggaaagctggcaacttctatgtgcccgcagaaccaaaattggcctttgtcatcagaatccgaggtatcaatggagtgagcccaaaggtgcgcaaggtgctgcagctgctccgtctccggcagatcttcaatggcacctttgtgaagctcaacaaggcttcagtgaacatgctgaggatcgtggagccctacattgcatggggggtaccccaacctgaagtcagtaaacgagctcatctacaaacgaggctatggcaaaatcaataaaaagcgcattgccttgacagataactccttggttgctcgatctcttggtaaatttggcatcatctgcatggaggatctaattcatgagatctatacagttggaaaacgctttaaggaagcaaataacttcctgtggcccttcaaactgtcttccccacgaggtggaatgaagaaaaagacaactcactttgtagaaggtggagatgctggcaacaggngaggaccagatcaaacaggcttattaggaaggaatgaacttaaggtggtctaccnatggattatttttctaagctgggttgggttaataaacagtacctgnctctcaaaatngaaaaaaaaaagaataaaa

SEQ ID NO: 169 - DNA, 586 bp, Homo sapiens
  misc_feature: Incyte ID No: LG:452134.1:2000FEB18
tacacccgccgagatattgatgcctaagaagaactgggattcccatttatgaactcctttttaaggagagagtcatggtggccaagaaggatgtccacatgcctaagcacctggagctggcagacaagaatgtgcccaaccatcatgtcatgaaggccatgcagcctctcaagtcccgaggctaagtgaaggtacagtttgcctggagacatctctactgctaccttaccaatgagggcatccagtatctccgtgattaccttcatatgccccggagattgtgcctgccaccctacgccgcagccattctgagactggcaggcctcagcctaaaggtctgaagggtgagcgacctgcaagactcacaagaggggaagccgacagagatacctacaggcagattgctgtgccccctgatgccgacaggaaggctgaggctgaggctggggctgggtcagagacggaattccagtttagaggcagatttggttgtggaggtggtcagccacctcagtaaagttggagaggattattttgcattaaataaacttacagccaaaaaaaatttaaaaaaaaatctcattaa

SEQ ID NO: 170 - DNA, 659 bp, Homo sapiens
  misc_feature: Incyte ID No: LI:903021.1:2000FEB01
ctcagttgtgagggggaaggtagactctttccagacctttgataaaggggctgctcaaaaaagccacgaccttgggcctctgctaaaaccatggctttaagtaaggagggagcagatatataaaaaaccttatccctctttctaatctcttatgtcctgtgagtgtcacccattgagtaaacccaagtggaagtcagcaggaaagtagctgggatgatgcagtctttacagggtgttgaagagaagaagaaggttcctgctgtgccagaaacccttaagaaaaagtgaaggaatttcacagagctgaagatcaagcgcctgagaaataagtttgcccaaaagatgcttctaaaggcaaggaggaagcttatctatgaaaaagcaaagcactatcacaaggaatatatgcagatgtacagaactgaaattcaaatatcgaggatagcaagaaaagctggcaacttctatgtatctgcagaacccaaattggcgtttgtcatcaggatcggaggttatcaattgggtgagcccaaaggtctgaaaggtgttgcaacttctttgccttcatcaaatcttcaatagaaactttgtgaagctcagcagggcttcaataatgtgctgaggtttgtagaaccatatattgcatgggcatacccaaa

SEQ ID NO: 171 - DNA, 443 bp, Homo sapiens
  misc_feature: Incyte ID No: LI:246422.1:2000FEB01
tgttgccttctttctgcctccgctaccgccatggcgcccatgaaaaagcttgtggtaaaggagggctaaaaaaaaaggaagcaggttccaaagttcactcttgatcgcacccaccccgtagaagatggaatcatggatgctgccaactttgagcagtttttccaagaaaggatcaaaatgaacggaaaagctgggaactttggtggaggggtagtgacccatcgaagggagcaagagcaagaccagcgtgacatccaagctgcccttttccaacaggtatttgaaatatctcaccaaaaaatatctgaagaagaataatctacatgattggttgcgcgtagttgctaacagcaaacagagttacgaattacgttacttccaaattaaccaggacgaagaggaggaaaacgaggattaaatttcatttatcggccgggcgcggt

SEQ ID NO: 172 - DNA, 586 bp, Homo sapiens
  misc_feature: Incyte ID No: LG:449404.1:2000MAY19
atccgtcgccccacggaagtctcggcggcgccggcgtgcttgtgatctcaacccaagtcgtgcctccgctccggtcacccgtcgctccacgcaaccatgtcgaggaggaagaccagggagcccaaggaggagaacgtcacccttggacccactgtccgtgaaggagagtatgtctttggtgttgctcacatctttgcatccttcaatgacaccttcattcatatcactgatttgtctgggagggaaactctggttcggatcaccggtggcatgaaggtgaaggctgaccgtgacgagtcgtcaccttacgctgctatgcttgctgctcaagatgtcgcacagcgctgcaaggagcttggcattactgcactgcacattaagcttcgtgccaccggaggcaacaagaccaagacccctggacctggtgcccagtctgccctcagggcgcttgctcgttccgggatgaaaatcggacgcattgaggacgttaccccggtccccacggacagcactcgcagaaagggcggtaggaggggaaaggaggactgtaggcgtcatcattactgcgtgccatttgctggctctt

SEQ ID NO: 173 - DNA, 551 bp, Homo sapiens
  misc_feature: Incyte ID No: LG:449413.1:2000MAY19
ccgccggcctccaactctaaccccgttgcttccggctcccgcagcgtcgccgaccttcacagccggttccttcctccgccaccatggggaagacacgtggtatgggagctgggcgcaagctcaagacccaccgcaggaaccagaggtgggctgacaaagcatacaagaagagccacttgggcaatgagtggaaaaaaccttttgctggatcatctcacgccaagggcatcgttctggagaagattggtattgaggccaagcagccaaattcggccatccgtaagtgtgcccgtgttcagctggtgaagaatggaaagaagattgctgcctttgtgccgaatgatggttgcctaaactacatcgaggagaatgtatgatgaggtgttgattgctggatttggtcgtaagggtcatgctgtgggagacattcctggtgtcaggttcaaggttgttaaggtgtctggtgtgtcgctgcttgcactcttcaaggagaagaaggagaagccaaggtcttagatcactttcggtagtccagaatggtgtaaactgcc

SEQ ID NO: 174 - DNA, 565 bp, Homo sapiens
  misc_feature: Incyte ID No: LG:450105.1:2000MAY19
gccgtcggcagctcggccgccgtactcccgctaccgagctaggaggcatcaccttcgccgatccaacatgggtaagacacgtggtatgggagctgggcgcaagctcaagacccacagaaggaaccagaggtgggctgacaaagcctacaagaagagccatctcggcaacgagtggaagaaaccctttgctgggtcatctcacgcaaagggaatcgtccttgagaagatcggcattgaggctaagcagcctaactctgctatccgtaagtgcgctcgtgtccagctggtgaagaacgggaagaagattgctgcctttgtgccaaacgatggttgcttgaactacatcgaggagaacgatgaggtgctgattgctggattcggtcgtaagggccatgctgtgggagatattcccggcgtccgtttcaaggtcgtgaaggtctctggcgtttccctcctcgctctcttcaaggagaagaaagagaagccgagatcttaaaacgctgcaagggtttgggcctggtggcgcaccccacacctgtagcgctcacacaagccatagcagacc

SEQ ID NO: 175 - DNA, 336 bp, Homo sapiens
  misc_feature: Incyte ID No: LG:460809.1:2000MAY19
gcgcatgggtggagtgggcttcaagaagtgcccctcgggcacacagagagatccagaaattcgccatgaaggagatggggactccaaatttgcacattgatgtgaggctcaacaaagctctctgggccaaaggaataaggaatgtcccataccatatccatatgaagttgcccagaaaacttaatgaggatgaagattcaccagacaagctctatgctttggttcctacatatacctgttaccactttcacaaatctatagacaggcaatgtggaagagagctaaccactgatggttcaatacattaagtaaaattatttttaaaaaagaaattta

SEQ ID NO: 176 - DNA, 932 bp, Homo sapiens
  misc_feature: Incyte ID No: LG:481781.1:2000MAY19
ggcggagcgtaaggcgaaggagtagcagcagcaggcggcgccgagtagcggctccccatctcgagcttgccaccatggctagaggattgaagaagcatttgaagaggctcaatgcccccaagcattggatgctggacaagcttggcggagcttttgctcccaagccatcttctggacctcacaagtctagggagtgcctgccactgatcctcatcatcaggaacaggctcaagtatgctcttacataccgtgaggtcatttccatcctgatgcaacgccatgtacttgttgatggcaaggtcaggacagacaagacctaccctgctgggttcatggatgtcatttccatccccaagaccaatgagaactacaggctgctgtacgataccaagggccgcttccgccttcacccaatcagggatgaggatgctaagttcaagctttgcaaggttaggtctgtccagtttgggcagaagggcatcccttatctgaacacgtatgacggccgcaccatccgctaccctgaccccctcatcaaggccaacgacaccatcaagatcgatctggagaccaacaagattgtggacttcatcaagtttgatgttggcaacgtcgtcatggtgactggcggaaggaacactggccgcgtgggtgttatcaagaacagggagaagcacaagggcagctttgagaccattcacgtggaggactcctgggccaccggttcgccacccgtatgggcaacgtgttcaccatcggcaagggtaataagccgtgggtgagcctgcccaagggcaagggaatcaagctgagcatcatagaagagcaaaggaagcgggatgccgctgcccaggctgctgccaacgcataaatcctctgaatgtgctgtgttgagagttttttctagttgctctgcaagaatatagaacaat

SEQ ID NO: 177 - DNA, 733 bp, Homo sapiens
  misc_feature: Incyte ID No: LG:1101153.1:2000MAY19
gcgaaggcgaccattccttcttcgctccttcgccgccgctatggttaagtactcgcaggagccgggcaaccctaccaaatcggccaaggccatgggaagggacctgagggtccacttcaagaacacaagggagacagcttttgcgcttcgcaagctgcctttgaccaaggctaagcgataccttgaggatgttattgctcacaagcaggcaattcccttccggagatactgtggaggtgttggtcgcaccgcacaagcaaagtctcgccactccaatgggcagggtcgctggcctgttaagtcagccaggttcatattggatttgctgaagaatgctgagagtaacgctgatgtgaaaggcttggacgtggacaacctctatgtttcacacatccaggtgaaccaagcccagaagcagaggcgccgcacctaccgtgctcacggacgcattaacccttacatgtcctccccttgccacattgagctgattctgtcagagaaggaagagcctgtgaagaaagaggctgacaacattgtcgcggcaaggaagcagtgaagtatgttagcctgctgataatggcatcctttcgaagcattatagccgtagctcttttatgtaccttttcaggctggtaccgataccgtggatctggatttgctatgttttgtactgtgctcgagtgtaaggtcagttcgtaatacaatcaatctgcgtggaacaatttgatatcct

SEQ ID NO: 178 - DNA, 699 bp, Homo sapiens
  misc_feature: Incyte ID No: LI:257695.20:2000MAY01
ggcgccgcgcggtgaaggttgtctagtccacgcttcggagccatgccgtccaagggcccgctgcagtctgtgcaggtcttcggacgcaagaagacagcgacagctgtgggcgcactgcaaacgcggcaatggtctcatcaaggtgaacgggcggcccctggagatgattgagccgcgcacgctacagtacaagctgctggagccagttctgcttctcggcaaggagcgatttgctggtgtagacatccgtgtccgtgtaaagggtggtggtcacgtgccccagatttatggtgagtcccaggaactgggcgcatggaggaggtggctctgggagggaggccttcacagcgctcctgtaccctttaattgtgtgtctttctcacagctatccgtcagtccatctccaaagccctggtggcctattaccagaaatgtgagtgagcatgggtccttcccatgaggtaggtgggtgtgtggggatcaagtcaaggactctgtgtgattatctaaatcctcgtccctgctcttcttgccagatgtggatgaggcttccaagaaggagatcaaagacatcctcatccagtatgaccggaccctgctggtagctgaccctcgtcgctgcgagtccaaaaagtttggaggccctggtgcccgcgctcgctaccagaaatcctaccgataagcccatcgtgactcaaa

SEQ ID NO: 179 - DNA, 568 bp, Homo sapiens
  misc_feature: Incyte ID No: LI:455771.1:2000MAY01
ccgcttcttgcagccgtcgccgcgaagcgctccagagaacttccgtcaacatggggaagacacgtggtatgggagccgggcgcaagctcaagacccaccgcaggaaccagcggtgggctgacaaggcatacaagaagagccatttgggcaatgagtggaagaaacccttcgctgggtcatcccatgccaagggcattgtcctggagaagattggtattgaggccaagcagcccaactccgctatccgtaagtgtgctcgtgttcagcttgttaagaatggcaagaagattgctgccttcgtgccaaatgacggttgtttgaactacattgaggaaaatgatgaggtcttgattgctggatttggtcgtaaggggcacgctgtgggagatattcctggtgtccggttcaaggtcgtcaaggtttccggtgtgtctctgcttgcccttttcaaggagaagaaagagaagccaaggtcttagattgctcttgctaccaaaatcagcaagcgtggagttgaaacgggagggcgttagatgattaagaagaatggttgcttgctatgtttgca

SEQ ID NO: 180 - DNA, 444 bp, Homo sapiens
  misc_feature: Incyte ID No: LI:274551.1:2000MAY01
gtcacatccttggcctgaaattctttgctgtagcccttcactgtgacacaactgcaaccaaccactttacaaagttttccttgtctatcagttttacaaaggcttagccatgtctctggtttcttaaggtcatcaaccttaattgggttgatttggtgttcggcacaaagggccacccctagcttgacatacataggctcttcacatttggatgcaagcacgcaaagatgggcttggcccttgtctaaggctttggcagctttgcaggttccacctgctaggccatcatggctgagggcggtcttcagtctcttgtagagcagtattaatatccattacacctccagcagcgtgtcttccttggcatggtggtgggtacaggtgaaggtgaatcttgagccactcaacttctgctctgagcatgttgccatgcagagaaagaga

SEQ ID NO: 181 - DNA, 779 bp, Homo sapiens
  misc_feature: Incyte ID No: LI:035973.1:2000MAY01
tatagggtaaacatccaattaaaaggcagatattggctatccttggggaggccagcaaatttccggataagggaagctggtgggcaggaaaaaggcatgcaatggccctcatgagccagaagaatagctgctgactgatgcctgggggaccaagcccataattgtggagctggagccgcactgtgtcccttgcttcagtctgatctttggggagcctgcacagttctgacctcagttaagagctaagggaagagatttgggaatgtttggccctgtgtaacagcaaaaggattcattggtgagggtgtctggcaggtatccgtaaagataataagatgaagggaacatcgccgtttggaaagtgtcgtgatatgatacacaagttgtgctgcctctgtggctctaaggcataccaccttcagaagtcaacctgtggcaaatgtggctcccctgccaagcgcaagagaaagtgtaactggactgccacggctaaaagaaaataccacggcgactggttgaatgaagcacctaaacattgtatactgcagatttaggcatggattctttgcaggaacaacacctacacccaagagggcagcagttgtgtcatccagttcatcttaagaatttcaatgattagtcacacaataaatattccggtttttaaaaatgtatatattttaaacatatatatgtttatatgtatatgttatatctgtattacatatatgtgaaaagaggcagagattgtcagattggattaaaaagctgtctgtaag

SEQ ID NO: 182 - DNA, 524 bp, Homo sapiens
  misc_feature: Incyte ID No: LG:978427.5:2000FEB18
  unsure 453: a, t, c, g, or other
gtggtgggtatgtgacggatgcctctgttttaggactacgccggctgtgctgttctggcagtggattaaccagtccttcaatgccgtcgtcaattacaccaacagaagtggagacgcacccctcactgtcaatgagttgggaacagcttacgtttctgcaacaactggtgccgtagcaacagctctaggactcaatgcattgaccaagcatgtctcaccactgataggacgttttgttccctttgctgccgtagctgctgctaattgcattaatattccattaatgaggcaaagggaactcaaagttggcattcccgtcacggatgagaatgggaaccgcttgggggagtcggcgaacgctgcgaaacaagccatcacgcaagttgtcgtgtccaggattctcatggcagcccctggcatgggcatccctccattcattatgaacactttggnaaagaaagcctttttgaagaggttccccatggatgagtgcacccattcaagttgggttagttggattctgt

SEQ ID NO: 183 - DNA, 2340 bp, Homo sapiens
  misc_feature: Incyte ID No: LG:247781.2:2000FEB18
ggcaggggccccgtgtcttactagcgatgccgtatctccccaacagtgctgggtatcatcacctatgcgggcatcgacctggccgtctacgagactctgaagaactggtggcttcagcagtacagccacgactcggcagacccaggcatcctcgtgctcctggcctgcggtaccatatccagcacctgcggccagatagccagttacccgctggccctggtccggacccgcatgcaggcacaagcctccatcgagggtggcccccagctgtccatgctgggtctgctacgtcacatcctgtcccaggagggcatgcggggcctctaccgggggatcgcccccaacttcatgaaggttattccagctgtgagcatctcctatgtggtctacgagaacatgaagcaggccttgggggtcacgtccaggtgagggacccggagcccgtccccccaatccctcaccccccacacctcagccactggagactgatgatccaaccacaggatccctactctttggccacgagatcccagtacccagatcctggatcctagactcctatgccccaaccattgggtcatgggatcccagcatccagatcctggatcctagactcctatgccccaaccactgggtcatgcgatccccacccttcagccactagatcccagatccccctgtaaccataactgtggatcccttacttcagcaactcaagtctgctaccctaaccacaagattcaagattatccacaccccagcccttaatccccatcccccaaatcactggatcctgcagccccacatcctaaggtggatcccacgcttccctgtgccccctactggatcctggacctctacgtcttaaccactggatcccacacaaatcagtgaatggatcccaacaccccaaccacaggagcacggattccctgtacctcaacacccagaccctgcctccctcaggcaccagatccagtgtcctagtgaaacgctggatcctagatccccaaccccagatccccatgcctcgagccctggatctccaagctcagctgctggattctggatgtcaacaaacctcaccactggatcctgacaaccacaatgcctggatcctggggcccccatcactggatcccagatcccctcactccacccactggattcctgcattggtttttggtttcctgctcctttttaacctcgacactgggtctcagatccttctgctgactgccagatccctgcatttcaagcactacgccttccacccccaggcactggatcccagattcccaagccttcacccaccagattctggctcctaaaacaagtgcgggggccccagtggcacagcaagtggatcctggcaactgcagctgctggattccagattctgggtccccaatccctctgcccagtccctcaatgttgaaacctcatctcttgaaggcagatcctgatattccaaggcactgaatcccaagccctgaatccccggtttctgatctgaatcttccaggcgccgggtcccaaatgttcaggccccaagtctagatcctggcagcccagtcacagagtatcccacacacactggtgcccagagccggcttctcatgacatgaaattgcatggtcgagggagtctgtggggaaggaagcccaggtcctggctgcaacctgcacggatgctggattccccctcaccccacctctgcatggccaccccctcccagccctgtggggaaactgttccctggaaccactccactccctgcatccccacacttcacagcatcttccatccccctcccaccttctaggcgaatagtccccagagctgtgttcctccaaggggtccgaggaatcactcactcctggaggctggcaaggagacagtctgaggccagggacacatgaagggatgtccccaccccagcactatcagggcctccccaggcttccagagttgaaagccaggagaaaatcggcaaagaccacccttccctaaacccaagcacccaatgatgcaaaaaacaaaaacaaaaaaaaaccaccaaatccccaaattcattccagatctatttttctaccagagagaggagcaaagtcctcctcccctgcgcccttacattctgcacttcatagttggattctgagcttaggatcatctggagaccccatggagggacttggaaaggggaactgggatttggggaggggctggaggacttccgcacgcttccacctccttcgacctccactgcgccccacctccctgcctgtgtgtgttatttcaaaggaaaagaacaaaaggaataaattttctaagctcttt

SEQ ID NO: 184 - DNA, 1199 bp, Homo sapiens
  misc_feature: Incyte ID No: LI:034583.1:2000FEB01
gtgcagcatgccaccgtgattcccgagaccatggcaggcacccagcagctggcggactggagaaatacgcatgctcacggaagccattataatcccatcatgcagcagcctgcactattgaccggtcatgtgacccttccagcagcacagcccttaaatgtgggtgtggcccacgtgatgcggcagcagccaaccagcaccacctcctcccggaagagtaagcagcaccagtcatctgtgagaaatgtctccacctgtgaggtgtcctcctctcaggccatcagctccccacagcgatccaagcgtgtcaaggagaacacacctccccgctgtgccatggtgcacagtagcccggcctgcagcacctcggtcacctgtgggtggggcgacgtggcctccagcaccacccgggaacggcagcggcagacaattgtcattcccgacactcccagccccacggtcagcgtcatcaccatcagcagtgacacggacgaggaggaggaacagaaacacgcccccaccagcactgtctccaagcaaagaaaaaacgtcatcagctgtgtcacagtccacgactccccctactccgactcctccagcaacaccagcccctactccgtgcagcagcgtgctgggcacaacaatgccaatgcctttgacaccaaggggagcctggagaatcactgcacggggaacccccgaaccatcatcgtgccacccctgaaaacccaggccagcgaagtattggtggagtgtgatagcctggtgccagtcaacaccagtcaccactcgtcctcctacaagtccaagtcctccagcaacgtgacctccaccagcggtcactcttcagggagctcatctggagccatcacctaccggcagcagcggccgggcccccacttccagcagcagcagccactcaatctcagccaggctcagcagcacatcaccacggaccgcactgggagccaccgaaggcagcaggcctacatcactcccaccatggcccaggctccgtactccttcccgcacaacagccccagccacggcactgtgcacccgcatctggctgcagccgctgccgctgcccacctccccacccagccccacctctacacctacactgcgccggcggccctgggctccaccggcaccgtggcccacctggtggcctcgcaaggctctgcgcgccacaccgt

SEQ ID NO: 185 - DNA, 1012 bp, Homo sapiens
  misc_feature: Incyte ID No: LI:333307.2:2000FEB01
  unsure 965: a, t, c, g, or other
aacagatgtgaaaaaagaattatgacaaggacaacctaatataagttttataaattttaggaaatgtcatctttttactggtttcagagactttttcaaatgttttaaacacaattttcagataacaataatgaaaagctgagccccaaaccagggacaggtgaaccagttttaagtttgcactacagcacagaaggaacaactacaagcacaataaaactgaactttacagatgaatggagcagtatagcatcaagttctagaggaattgggagccattgcaaatctgagggtcaggaggaatctttcgtcccacagagctcagtgcaaccaccagaaggagacagtgaaacaaaagctcctgaagaatcatcagaggatgtgacaaaatatcaggaaggagtatctgcagaaaacccagttgagaaccatatcaatataacacaatcagataagttcacagccaagccattggattccaactcaggagaaagaaatgacctcaatcttgatcgctcttgtggggttccagaagaatctgcttcatctgaaaaagccaaggaaccagaaacttcagatcagactagcactgagagtgctaccaatgaaaataacaccaatcctgagcctcagttccaaacagaagccactgggccttcagctcatgaagaaacatccaccagggactctgctcttcaggacacagatgacagtgatgatgacccagtcctgatcccaggtgcaaggtatcgagcaggacctggtgatagatttaatatcagaggaacaacaataggtgatagaataatgagacgctctgctgttgcccgtattcaggagttcttcagacggagaaaagaaaggaaagaaatggaagaattggatactttgaacattagaaggccgctagtaaaaatggtttataaaggccatcgcaactccaggacaatgataaaagaagccantttctggggtgctaactttgtaatgagtggttctgactgtggccaca

SEQ ID NO: 186 - DNA, 318 bp, Homo sapiens
  misc_feature: Incyte ID No: LI:814710.2:2000FEB01
cgaaggacctgaaggaaagtggaaaagtccaaagtttaagatgccagagatgcattttaagactccaaagatatccatgccagatattgacctgaatctcacaggtccaaaaataaaaggagatgtggatgttacaggccctaaggtagagggagatctgaaaggtcctgaagttgacctcaaaggccccaaagtggacattgatgtcccagatgttaatgttcagggtccagactggcacctgaagatgcccaagatgaaaatgcctaagttcagtatgcctggcttcaaaggagagggcccaggttctagatcgcg

SEQ ID NO: 187 - DNA, 677 bp, Homo sapiens
  misc_feature: Incyte ID No: LG:414732.1:2000MAY19
  unsure 45, 618: a, t, c, g, or other
agaggagcgaaaagcatggtccggggggcggcggacgcctggtangcgctcgggccgttgttgtggggctgcgcgctggcgctgcagggcgggatgctgtacccaagagagaggccgtcgcgggagcggaagaagctggaccgcctctggagcttccgcgccgacttcttcgacaaactgtgccttggcttctaggagtagtggtatcggcgtctgctgcgagagtcgggctccaccatggacataccggttccctccagcttcaacgacgttggccaggactggcggctgcggcattttgtagaccagatgtggtacgaacgggaggtgaccttcctggagcaatggacccaggacctgcacacaagagtggtactgaggattgtcagtgcccactcctatgccatcgtgtgggtgaatggggtcgacgcgctagagcatgagggatctacctcccctttgacaccgacatcagtagcctgttccaggtggggcccctgccctcccgcctccgcatcactatcaccatcggcaacatgctcatctcctccaccctgccaccagggagcatcctcgacatggccgacacctccacgtgggtaccatcctgcttccacngcagacacccaccttcctgtcccaccccgtggggcattacattagggtaattacattag

SEQ ID NO: 188 - DNA, 1295 bp, Homo sapiens
  misc_feature: Incyte ID No: LG:413910.6:2000MAY19
  unsure 1275: a, t, c, g, or other
gatttggctcccagctttgtagttcggaagaagttgggtctatagatttccccctaactctccattgatgtgttgagcttcagagggaataataactctacgtaaagcatgctggcgtctcaaggagttctcctgcatccttatggcgtgcctatgattgtaccggcagctccttaccttcctggactgattcagggtaatcaggaagcagccgctgcccctgacacaatggctcagccttacgcttcggcccagtttgctcccccgcagaacggtatccccgcggaatacacggcccctcatccccaccccgcgccagagtacacaggccagaccacggttcccgagcacacattaaacctgtaccctcccgcccagacgcactccgagcagagcccggcggtctttttatttgtcattacacgtgctgtggcattatttacctcgattttacggccctctaccacggtgccgtgtaatttctccctcgccctgtccgcatcggcactattttcgaaagttacgaaaccaaatccctttgagcctcgctcattaaaaataatttcaacatctaagattttaccaaattgaccaaacatttgtctgaggtccggatcccggaacctgaaggggatattggagacatgcagccgcttgggctgagacttgttttccgtgttttcagaaggttgtgtctggggctggccatccgtcggtgctgcgtcatctgtctgtgtggcggtgccagagacggtctgagcgctcgtgtccgccgggctctgctcggagtgcgtctgggcgggagggtacaggtttaatgtgtgctcgggaaccgtggtctggcctgtgtactctggcgcggggtggggatgaggggccgtgtattccgcggggataccgttctgcgggggagcaaactgggccgaagcgtaaggctgagccattgtgtcaggggcagcggctgcttcctgattaccccttagctgctctctttcacaattcatctgttgtcttgaaacctttctgtcttctatttccacgcaggtattgcagtctgctttgatatcctgaagggcatctcccacgactgcaattagctgccaagatttcattgtcggctgcaaagtgcctcctgtttcctcaccgggaaaacacagcacgggagaagtccgaggcaacagcaaacggcacccacgtgctagcaatgtaaatgactccagtcatctgtcgttgcgcgccgcgcgccttcgctcgcccgggctgcctggcacgacngccagcaggtgcagaacgcc

SEQ ID NO: 189 - DNA, 751 bp, Homo sapiens
  misc_feature: Incyte ID No: LI:414732.2:2000MAY01
gagagaggagcgaaaagcatggtccggggggcggcggacgcctggtaggcgctcgggccgttgttgtggggctgcgcgctggcgctgcagggcgggatgctgtacccaagagagaggccgtcgcgggagcggaagaagctggaccgcctctggagcttccgcgccgacttcttcgacaaactgtgccttggcttctaggagtagtggtatcggcgtctgctgcgagagtcgggctccaccatggacataccggttccctccagcttcaacgacgttggccaggactggcggctgcggcattttgtagaccagatgtggtacgaacgggaggtgaccttcctggagcaatggacccaggacctgcacacaagagtggtactgaggattgtcagtgcccactcctatgccatcgtgtgggtgaatggggtcgacgcgctagagcatgagggatctacctcccctttgacaccgacatcagtagcctgttccaggtggggcccctgccctcccgcctccgcatcactatcaccatcggcaacatgctcatctcctccaccctgccaccagggagcatcctcgacatggccgacacctccacgtgggtaccatcctgcttccaccgcagacacccaccttcctgtcccaccccgtggggcattacattagggtaattacattaggagaacttgttgtttaaaagagtgtggcaccttcatccacctttttcctttcttgccatgtgacacaccag

SEQ ID NO: 190 - DNA, 4466 bp, Homo sapiens
  misc_feature: Incyte ID No: LI:900264.2:2000MAY01
tgaaagtactttgactcccaagggtatctgatctgatggagagaatgtatcacttgtaccgatgcggatagaacgctcattaattacagcacagttttcataaattccaacttccctaggaattttgtcttttgaaggcatgttggaagttggggcattaggatataatctcagtccatgtactaagcctctgcataactgaaagatagagtcaataaaattcactctctcattttttgtttttaatctcaagaatttttgccttgaaggacgaatgtagtggcgaatttgatgtttgaacgaatcccagtcagaagttccagcctgccactgttctctgatgccatgctatgaccaacatcaagctgtattgtcctctcatccgtaactgtgaactgagcaggatctatggcactgcatgttactgtcaccagaaacatctctgtttgttcctcatcgtacattcctcagagtcgactgagatacacacctcatccagcatatgctaccttttgcaggccaaaggagaactggtggcagtacacccaaggaaggagatatgcttccacaccacagaaattttacctcacacctccacaagtcaatagcatccttaaagctaatgaatacagtttcaaagtgccagaatttgacggcaaatagtgtcagttctatcctgtcgatttgacagcaatcagctgcctgcaaatgcacccattgaggaccggagaagtgcagcaacctgcttgcagaccagagggctccttttgggggtttttgatggccatgcaggttgtgcttgttcccaggcagtcagtgaaagactcttttattatattgctgtctctttgttaccccatgagactttgctagagattgaaaatgcagtggagagcggccgggcactgctacccattctccagtggcacaagcaccccaatgattactttagtaaggaggcatccaaattgtactttaacagcttgaggacttactggcaaggagcttatagacctcaacactgggtgagtcgactgatattgatgttaaggaggctctaattaatgccttcaagaggcttgataatgacatctccttggaggcgcaagttgggtgatcctaattcttttctcaactacctggtgcttcgagtggcattttctggagccactggcttgtgtggcccatgtggatggtgttgaccttcatgtgggccaatactggcgatatcagagccatgctgggtgtgcaggaagaggacggctcatggtcagcagtcacgctgtctaatgaccacaatgctcagaatgaaagagaactagaacggctgaaattggaacaatccaaagagtgaggccaagagtgtcgtgaaacaggatcggctgcttggctttgctgatgccatttagggcatttggagatgtcacgttccaatgggagcattgagctttcaagaagagagtgatagaatctggcccagaaccagttgaatggacatgaattttccaagtttattcctcctaattatcacacacctcctttatctcactgctgagccagaggtaacttaccagcgagttaaggccacagggataagtttctggtgttggctactgatgggttgtgggagactatgcagtaggcaggatgtggttaggattgtgggtgagttcccttaactggcatgcatcaccaacagccaatagctgttggtggctacaaggtgactctgggacagatgcatggccttttaacagaaaggagaaccaaaatgtcctcggtatttgaggatcagaacgcatgcaaccgcgatcgtcattcggccaccgctgtgggcaacaacgagtttgggactgttgatcattgagccgcttctctaaaatgcttagtcttcctgaagagcttgctcgaatgtacagagatgacattacaatcattgtagttcagttcaattctccatgttgtaggggcgtttcaaaacccagaatagtgagtggctctttcactggcaattctcaaatgatacacatttaaagggcagattttcttaaaaagatactactataataaacatttccagttggtcattctaagcatttacccctttggatactctagctagtcaggtactccaaattgacctttgcagcagggtggcagggtcaggagagtctggtcctgcctagctcagatttcagtggcagcctgcacttgaagcaacgtcacttctttatcacaggtcgtcttgagacattcagcttcttttaccaaacctgagaaaattaggatgcacctggccaaataagatcttgaataggccaaaagcaagtatcttgctgtgtgtagtctcttggttcaagtgaagcaacagtactgttcacacctttcttcactgagattcccagtgtacatgagaacatatatttattgcatgattttcctagatacacagtcctatgcattattcatatacatttattttagcctaaaagtgggtttcaaatcccagttccttcaagccataaatgaccaaggtccaaggcaatctggaatttgtttttgtgattatttgactggaatgcttcttaagtggaataacctatactccgttatccacccgatttcctaatgtaattgaaagattttcctattttgccacacacttggagaacaataatgggtttttagttttatctactcttctattgaagttaaagaaagaaaaaaagatttttttatttggtattaatgaaaagctttagtttaaaataaggagatccagaataaaaagaagagactgatctcttcaattattgtcatctgtagccaccagcacatcactcttatgtaatccccaaaggcttggcatgccgtaagtgtgtggtgggtagactgctgccggggaatcgtacttcttatttagtaatgataagacttttcattaattttgccatttttaaagatgacataaataagtttaaatatcaatttggggagtaaggtttaatattgccatcgggtattgagacaggaggaagtttctgtttttctccatttagaccataggtcaattaaaatatttgggtttaaaaattgacctaaatgctttaaacatattgtagcttaagatatatgtgttaagatatatacatgagaaactttaaaaggtaactactgtgcatgcctgatgcttaatagaatacttagtggcatcaaatgtttgcagcagtctccatgagttatgttcggtcccttctaatactgtatcaatgtaaatgaaataaagtatattcaaattggctttttgatatgcatcaagtggcattttgtctcctgtgtttaatagtgatctgtatacaggctgtgcacatattgtcatcacttattctagcatcactgttaaaggctgtgattatgtttgatattcacctgcgattttaatacaagccaatatcagcttcccattgtgtaataacttgggtgtttaggagtcttttcacattttttggcgatatgaactagatgttccaagaaactccttcctggactgtggatactgaatcagtgtactattggctgcagaatttgtttcaattgaaaatagactcaggaagattgctgctcagaatatcatatagatgtctattttttgaggtgtttttgtttttatttgtgtgtttttcttttttttaagtcagcttggaacttttttcctgggtagtatttgggagagggaaaggctgtcactatatatttatttctctaatgttttggctcgggcctttttctctttaatgagaatatagtgtggctggtctcatgacaaaacccatattacagtctactatgagaatattcttgaacaccaccactgaagagtttcatatacaccaaataatgtctcatctctatagtacagggaatataaaattggtttcctgtggtcatgatccagatagtaggtattattaccacaagaacttgggtctgccagtcctggaaagcttgtctgctctatagaaatgaaaatgcagcatgaagttgacattgtggaaatgaaaagtaattgggtattagaaatctgaaagtactgtccatctaaaagcaattgtggattttattgtaattggttgtccccttttgttccggtttcttagaattaaaagaatacatgtaaacctttccatggtatttaagccctttccttaaatttttttaaaatttaaactttcctaaccctatgtattcaacttctgtatttatatttaatccagtggttcatgttatataatacacccttaactagttaaatggaatgttggtatggtacagagtaccatattgctaagaaaactgtcttataaaagatgtatatggtgtgaagacatgaaagtttaatgtaacagaatggttggagaaatgcctatggtgaattaaagcttcatatctgctttctgaaaaaaaaa

SEQ ID NO: 191 - DNA, 1798 bp, Homo sapiens
  misc_feature: Incyte ID No: LI:335593.1:2000MAY01
  unsure 111, 145, 147: a, t, c, g, or other
aaccagcagcgggaggagcgcaacgctagcgcggcgcggggaccgccgcgcttccttcccggctcctgccctcctctgccgctcgctcctctctcggcatccacctccttnccctcctcctgctcattcactctttccctcactntnccctcctcctcggcttctccccgcgccccgccagccctcgcgctctcccactccctctgcctgtcctccccggtcccctcctcccgctcattcactcgcccctctcccttctccactctctccccctgtctcctttcttcttcttctttcaccctccgtctctcacaccccctccattcccctgtctcctttctgacactgcactgcagctgctcctcagccctgccccctccccagtgagaacaaaccagcaacattgctttttttcctaaagagatttatattgatccgattaaaaaaaaaaaaccttaagaaacccccgacgcccgaaagaaaaagaaaaaaaaaaagaaaaaagaaaagaaaaagccaaaacaaaagggagaaccttctcccggtagcagcggcaggaactgcaaacatgatggcggcagctcccatccagcagaacgggacccacactggggttccctatagacctggacccgccggactcgcggaaaaggccgctggaagccccccctgaagccggcagcaccaagaggaccaatacgggcgaagacggccagtattttctaaagggttctcatacctagttatgctgctggatctataattggggaagggaggacagacaattgttcagttgcaaaaagaaactggagccaccatcaagctgtctaagtccaaagatttttacccaggtactagctgcagcgagtgtgctgtgagtccagggaactgttgaagtgctgaatgcatggttcatggcacttcattgcatcagacacatagttcgagaatatgccctataaatatggccaagacagaaccagtcagcattctacaaccccagaccaccgttaatccagatcgcatcaaacaaacatttgccatcttccccaatctaccaccaagtcctctccatctgatcccatgagccccctccagagctaatcaggtacagtatcatcctgtcatctacaccatacttttcaccgggtgattgcctgcaaaactggagcaacacaagatcatggtgggttccaggatttcattcgttcattcacatatatgtcaccatagtcagatttccaataacctatagaaagaaatatctcattattttctcaacattttctatgcctttctaattttagataacaaatactatattcagatattataactactctaattttttaattaatttttccctaaaaatttgactacctaatggggcacctgaagcctatttattgaaattggtaatttttaatctccccttattgtatcttcctaggaatttttcaaaagtaaattaaggatatctatatatgtaaaaaaaaaaatgtataaattgagcaaaggtatatctttaaaagtgaatgcaattttatttgctttttatttgagacatgccttatgatgtaaacaactttcaactattgatgaaaagcatttctagcaatctaaaagaaactgaaaattggtatttgtggtaattttaatgtttaacaactcaggagatggtgttttcttagtattttaaaaaattctaagcattttcattgctctgctgacaaactttgccaagtagaatatattttattagtttggatttatggattggtttgggtactatttgtag

SEQ ID NO: 192 - DNA, 3690 bp, Homo sapiens
  misc_feature: Incyte ID No: LI:1189543.1:2000MAY01
  unsure 2889: a, t, c, g, or other
gaattccgacaaaacaaaagggagaaccttctcccggtagcagcggcaggaactgcaaacatgatggcggcagctcccatccagcagaacgggacccacactggggttcccatagacctggacccgccggactcgcggaaaaggccgctggaagccccccctgaagccggcagcaccaagaggaccaatacgggcgaagacggccagtattttctaaaggttctcatacctagttatgctgctggatctataattgggaagggaggacagacaattgttcagttgcaaaaagaaactggagccaccatcaagctgtctaagctgtctaagtccaaagatttttacccaggtactactgagcgagtgtgcttgatccagggaacggttgaagcactgaatgcagttcatggattcattgcagaaaaaattcgagaaatgccccaaaatgtggccaagacagaaccagtcagcattctacaaccccagaccaccgttaatccagatcgcatcaaacaaacattgccatcttccccaactaccaccaagtcctctccatctgatcccatgaccacctccagagctaatcaggtaaagattatagttcccaacagcacagcaggtctgataatagggaagggaggtgctactgtgaaggctgtaatggagcagtcaggggcttgggtgcagctttcccagaaacctgatgggatcaacttgcaagagagggttgtcactgtgagtggagaacctgaacaaaaccgaaaagctgttgaacttatcatccagaagatacaagaggatccacaaagtggcagctgtctcaatatcagttatgccaatgtgacaggtccagtgggcaaattccaatccaaccggatctccttatgcaaacactgctgaagtgttaccaactgctgcagcagctgcagggctattaggacatgctaaccttgctggcgttgcagcctttccagcagttttatctggcttcacaggcaatgacctggtggccatcacctctgcacttaatacattagccagctatggatataatctcaacactttaggtttaggtctcagtcaagcagcagcaacaggggctttggctgcagcagctgccagtgccaacccagcagcagcagcagccaatttattggccacctatgccagtgaagcctcagccagtggcagcacagctggtggtacggcggggacatttgcattaggtagcctggctgctgctactgctgcaaccaatggatattttggagctgcttctcccctagctgccagtgccattctaggaacagaaaagtccacagatggatccaaggatgtagttgaaatagcagtgccagaaaacttagttggtgcaatacttggcaaaggagggaaaacattagtggaataccaggagttgactggtgcaaggatacagatctccaaaaaaggagaattcgtacctggcacaaggaatcggaaggtaaccattactggaacaccagctgcaacacaggctgctcaatatttaattacacaaaggatcacatatgagcaaggagttcgggctgccaatcctcagaaagtgggttgagtgccccagttacacatcagattgttttaacccctcctttaccccattttcaagaaggatgtactgtactttgcagaagtgaagtttttctgttattaatatataattatgcaaatgaatgcgactatgttgacaatgtgtatatgtaaataatatgtgttttaccagatgtttcatagaaagaattttttcttgatctgttttgttctctatactttgcttgtgtatatttgtcagaggtgtttctagtgtaagatttaagcctgccattttaccagcattattgtagtttaatgattgaatgtagacagggatatgcgtatagttttcagtattagttctagataacactaaattaactactgttaggttgagtatggtggggtcagtgacctaaaatggagtgaggccaaagcactgtcctgtaagtcttacttcctgcttagggcacagtgacagtcggaaacatatttcgaaactaacgtctcaaatttaaaatgatcaaaaccgccatatacgttgccctacaacgccctgtcaactattctacacggttaaactgtggaccattatatgggtaagtttacagatcaataaaagcacctgttctccatctgaactagacaatggaaataatgctgcatgctggccatggcccattcttcatcatttgtaagttcaacaaaagttctcacatggagtcccacctcttcagaggtttgtacatttgtttttaagcactgaattcactactgatcccatcgcctggccagtagaacagtcattactccattaacatcctcactgtttagacacataactgtggtacagtgtattggaaattttataaacaaaagtgaaagtgccaacaaattattgatagctgataatgtttcattatctgcaactgcttgataagtatgttgcattttaagagcttataattgtgtataatttgttaacactagaaacctattagtattgtgaatgtagattttactgtgaagctatctgtgatttagctgtttgctcccatgatggagtctttgcagcatggcgctagcagccaatgcagtttctaatactcggtaatttgcatgttttgtggagcatttttatgtcaccaaccagacagtatttcctgcatgcttatttagaagaggcagcttatcttgagaggtagtgttatctacctttgtcaggctttttgacaggtcatttcagagtaagcctttgttcccaagacccaacaactgtcaccctcttctgtacctctcctgagtgccaactgtgcnaggccatttgacacaccatctgttaacctctgagtttgcccactcaaggccactcataggggcatcctagccctgtgcactcagcactcataggatcatccagactctcatgcggcatgcagtctaatcatgacaaataatgctgctactctgatatctggctgagcaactgaattacaaaagagaattacttccatctcaacttcaacccattgattacgtccatcctagcaagctaaatggcatcccagctgctcctttctgtgcaaccaattaaagaacaatgagtgtgatgctccatgtctgaatttcgtccagcctctctctgaactgtgatctttgtcctcatgaactttcccttttgttcattgaactatatggactctgtcatttcatattgatttactgtgcaatttacttttggacattgagaacttgaaattatttcctgatcccttccccttccactattaataattcatttctgtcaaactgtaagagtagactcatttttttttttttagtttttaacattggactgttatttcatttagagttctctatctctaaatatttatttagagaatgattttaaaagggaatgatatgccttgtttaaatgaaagagaaaagctgtagtaaactgtgttaattggtaatgactatttatcgtcgatactctgtagctgtgtaagttttgacaaatagtgtatctcgtggaatcagtggttagcattgccgctattatatttactcattttatcattataaatgtgcttagttcatcatgtaaaaaaaaaa

SEQ ID NO: 193 - DNA, 588 bp, Homo sapiens
  misc_feature: Incyte ID No: LG:455450.1:2000FEB18
ggcggcggcatccttcgccgctccggcagcagctccagctccagcagctcgtcatctgaagacgacggcatgggtgggcgccggaagaagggcctgaaggagaagatcaaggagaaaatgccaggaggccacagggaaggccagggccaggcgacggccaccggtgcgtacggcgggacagggtacgtggctgggccgacgaccggaggcccccacgagaagaagggtgtggtggagaagatcaaggagaagatcccaggcggccacaaggactacgaccagcatcagcacaccaccgcggcaaccggtggcggcggtggctatggcggaaccaccgacaccacgtatgggacgacgaccactgaaggcactcacgagaagaagggcttcatggacaaaatcaaggagaaactccccggtcagcactaagcactaagcagctgcctctttcctcttccggctagctgcctctttcctcttccggttggcgactgcctgtaagtacatgtatacagaataaataaagcaataaagaataagcggcagctacgtatgtgtgtgtattcgtgtgtatgcattgtaaggcag

SEQ ID NO: 194 - DNA, 640 bp, Homo sapiens
  misc_feature: Incyte ID No: LG:1040978.1:2000FEB18
ctcctacctacgcagcagaggccagccacctccccgtcgctctcacgctcttcgtgcccgccgcctctcctccgtctctgcctctctccctctcccctcccgtctgacgcacatggcctccatcgccggatcttcggccctctccttcgccaggcccgtcaaggcaatcaacacaaattctctagctttctccccggcgaggaagggcaacacattcctccgcctgcaaccaatgcctatgagatctgtttcctgcgctgccaagaaggatacaacagacaaggtttgtgagattgtgaagaagcagcttgctcttcctgaccatactgaagtttgcggtgaatcgaaattctctgaactcggtgcagattcactggacacggttgagattgtgatgagtctcgaggagcacttcgatattagcgtggaggagtccagcgcacaaacaatcgccacagttgaagacgccgcggacctcatcgacaagcttgttgctggcaaagcgtagttctgtacctcctctatcgttgtcctaccactctaggtctatcccttgatctaggtttctatggtctgaagatttgtgattttctccgcactgttgttgctatccccgtgtcgtaataatacgagatgtttt

SEQ ID NO: 195 - DNA, 380 bp, Homo sapiens
  misc_feature: Incyte ID No: LG:446649.1:2000FEB18
gctgaaagcgcgggagcaagctcagaagagggaagcaatccaggtcacctcgccagtatgtctcaggctgattttgagaaaggcgggtgaggaggtgaagcgcctcaagactcagccaactgatgaagagatgctgttcatctacagccacttcaaacaagctactgtgggcgatgtaaacacagatcggccggggctgttggacctcaagggcaaagccaagtgggactcgtggaacaagctgaaaggaacttccaaggaaaatgccatgaagacctatgtggaaaaggtagaagagctaaagaagaaatatggaatattaacgaccagatttggtgggcagccacatgtgtgacataatacctgtgaggacataatgc

SEQ ID NO: 196 - DNA, 3854 bp, Homo sapiens
  misc_feature: Incyte ID No: LG:132147.3:2000FEB18
ccgcgtcctccgcggctcaggacgactacgctcggcacgtccgggaccctccggccgtggcggttgcagcgccaaaagctcgggcctcagcccctgacgctgtggtgactccgccgcgcctcgccgtcgcccctgtccccgtcctgcccgccgcctccgccgctggggacatgtccaaccccggaagccggaggaacgggcccgtcaagctgcacctgacagtactctgtgcaaaaaacctggtgaaaaaggattttttccgacttcctgatccatttgctaaggtggtggttgatggatctgggcaatgccattctacagatactgtgaagaatacgcttgatccaaagtggaatcagcattatgacctgtatattggaaagtctgattcagttacgatcagtgtatggaatcacaagaagatccataagaaacaaggtgctggatttctcggttgtgttcgtcttctttccaatgccatcaaccgcctcaaagacactggttatcagaggttggatttatgcaaactcgggccaaatgacaatgatacagttagaggacagatagtagtaagtcttcagtccagagaccgaataggcacaggaggacaagttgtggactgcagtcgtttatttgataacgatttaccagacggctgggaagaaaggagaaccgcctctggaagaatccagtatctaaaccatataacaagaactacgcaatgggagcgcccaacacgaccggcatccgaatattctagccctggcagacctcttagctgctttgttgatgagaacactccaattagtggaacaaatggtgcaacatgtggacagtcttcagatcccaggctggcagagaggagagtcaggtcacaacgacatagaaattacatgagcagaacacatttacatactcctccagacctaccagaaggctatgaacagaggacaacgcaacaaggccaggtgtatttcttacatacacagactggtgtgagcacatggcatgatccaagagtgcccagggatcttagcaacatcaattgtgaagagcttggtccattgcctcctggatgggagatccgtaatacggcaacaggcagagtttatttcgttgaccataacaacagaacaacacaatttacagatcctcggctgtctgctaacttgcatttagttttaaatcggcagaaccaattgaaagaccaacagcaacagcaagtggtatcgttatgtcctgatgacacagaatgcctgacagtcccaaggtacaagcgagacctggttcagaaactaaaaattttgcggcaagaactttcccaacaacagcctcaggcaggtcattgccgcattgaggtttccagggaagagatttttgaggaatcatatcgacaggtcatgaaaatgagaccaaaagatctctggaagcgattaatgataaaatttcgtggagaagaaggccttgactatggaggcgttgccagggaatggttgtatctcttgtcacatgaaatgttgaatccatactatggcctcttccagtattcaagagatgatatttatacattgcagatcaatcctgattctgcagttaatccggaacatttatcctatttccactttgttggacgaataatgggaatggctgtgtttcatggacattatattgatggtggtttcacattgcctttttataagcaattgcttgggaagtcaattaccttggatgacatggagttagtagatccggatcttcacaacagtttagtgtggatacttgagaatgatattacaggtgttttggaccataccttctgtgttgaacataatgcatatggtgaaattattcagcatgaacttaaaccaaatggcaaaagtatccctgttaatgaagaaaataaaaaagaatatgtcaggctctatgtgaactggagatttttacgaggcattgaggctcaattcttggctctgcagaaaggatttaatgaagtaattccacaacatctgctgaagacatttgatgagaaggagttagagctcattatttgtggacttggaaagatagatgttaatgactggaaggtaaacacccggttaaaacactgtacaccagacagcaacattgtcaaatggttctggaaagctgtggagttttttgatgaagagcgacgagcaagattgcttcagtttgtgacaggatcctctcgagtgcctctgcagggcttcaaagcattgcaaggtgctgcaggcccgagactctttaccatacaccagattgatgcctgcactaacaacctgccgaaagcccacacttgcttcaatcgaatagacattccaccctatgaaagctatgaaaagctatatgaaaagctgctaacagccattgaagaaacatgtggatttgctgtggaatgacaagcttcaaggatttacccaggactctatttatacaaccccaactgacagcctcctttcagcagagtttcaaagaatatgctgaaatacaggaaaacactcccccccccccccttttttttttttttttacattttaggacactgtgaggggaaaggacaattttgaaattccttttcaaggaaaaaaaaggtctttatgctttgccatgaggccacattcagctgctatttaaacttaatatcttgaacctaaagaatgctgacttttcctacatttccagagttaggcagtattctacacttaaagactactactatttttataaaaggtaatctattcaaatttcttcacagatttcaagtctctcaaacatcaagacaacttcagcagtcggtacaagtcacatttcattttgattgaatacatgatcttgaacagctcctgtacttgctctttgtaaaaaaaaataaaattattttgaattattctacctttgtaaacaattggctaaaagaatcatctttaagaaattaagccatttacatgtttgtgtttttctatagcagagcattatattttgcattatatgtttcaacctagtctaagtgggtcttttttacatttttcaagaacggatttcctggaatacagcgatataattttggttgtcaaattcctaatgcaaccatttagtctaaacttagtcatttatttgtgacaataagatgtgttcaggggctccctgtttttaagagactctttaaaaaaaaaaaaacctaatgtttttatcttgagtcaatatgattaggtattttggatttacttttaatcttaaaatactgcatttttatagcttctcagagcatgtggatgggatgggattttcgttattttgctgggtcagcttatctttaatatatggactattcctataaaccaaagtctctgacaagtgcacctaatttatattgtattttaactacagtgtaagtttccattaacaaaaccatcctaaagcgttaactgctcataattttaatcagctacagttatgaaaaaggaagaattttgctctaaagattattaataagcttagaaaatcctgcttttacctaacagaatgaagtggggttgaggggcggtagtatgaacagtgattctaactctatggcgtaaattactttgaagagttcattttggaagtaagggaatcccgcttcccttggtgttgaagatctgcatctgattttgaaacgtccagatttagctttcaaggtgcgtgcatgttgaatgatccagaagcaacgaaaactctggggtgagggattgaaaaaatctgaaatcacagttggatttttaaattcaaccatcaaaaatatgtactatcagtttttttctacattgatgtgaaataagcaattttcatgataatta

SEQ ID NO: 197 - DNA, 905 bp, Homo sapiens
  misc_feature: Incyte ID No: LI:036034.1:2000FEB01
gggaggatgacctcttaccgggagcggagtgccgacctggcccgtttctacactgtcaccgagccccagcgacacccgaggggctacacagtatataaggtcaccgcccgggttgtttcacgaagaaatccagaggatgtccaggagggagaatcctgaaccaacctatccatgaacatactctctgccattttcttagtccttttttcgggaaaactcttttataataacaactgttggtgaaccattcatctgaaaactcttataattgtatggaagagatacagtgattttaagaaactacacaaagaactatggcaaattcacaaaaacttattccgacattcagagttgtttcctccatttgctaaaggaatagtgtttgggcgatttgatgaaactgttatcgaagagagaagacaatatgctgaagacctgctacagttctctgccaatattcctgctctttacaatagtaaacagcttgaagactttttcaagggtggaataattaatgatagttctgaattaattggtcctgctgaagctcactcagattccctcattgatacctttcctgagtgtagtacggaaggcttctccagtgacagtgatctggtatctcttactgttgatgtggattctcttgctgagttagatgatggaatggcttccaatcaaaattctcccattagaacttttggtctcaatctttcttcggattcttcagcactaggggctgttgcttctgacagtgaacagagcaaaacagaagaagaacgggaaagtcgtagcctctttcctggcagtttaaagccgaagcttggcaagagagattatttggagaaagcaggagaattaataaagctggctttaaaaaaggaagaagaagacgactatgaagc

SEQ ID NO: 198 - DNA, 585 bp, Homo sapiens
  misc_feature: Incyte ID No: LG:162161.1:2000MAY19
gagtcttcggcgagacctaccgggccctgtctgtgccggccgtgagctgcggcaggacggctggagattacttctctaacaggatcaccagtttgctccacaaagcacaatgtctcgatcacgacaacccccccttgtgaccggcatctctccaaatgaagggataccatggacgaaggtcacaatcaggggagaaaatctggggactggccccaccgacctcataggcttgaccatttgtggacataattgcctcctgacggcagaatggatgtctgcaagtaaaatagtatgtcgagtgggacaagccaaaaatgacaaaggagacattattgtcaccactaagtcaggtggcagaggaacctcaacagtctctttcaagctactcaaacctgagaaaataggcattttggatcagtctgctgtgtgggttgatgaaatgaattattatgatatgcgcactgacaggaacaaaggaattccgcccttgtccttacgtcctgctaacccgcttggcatggagattgaaccaagtacattttcgcagaaggacttagaaatgctattccatggaatgagtgctga

SEQ ID NO: 199 - DNA, 518 bp, Homo sapiens
  misc_feature: Incyte ID No: LG:407214.10:2000MAY19
gaaaagagtgctccaccttcactgaagccagcaatttggccggctgttagcacttcattcatattccctagtatgagttaattctttgtcattttatttcttgtgattccagaatctcattttcagcttctgccagagccagtagcagttgggaaagaaggctgtgctctttgaagagagtcagccagcctgaaagagcaggatggatcttgatgtggttaacatgtttgtgattgcgggcggcacgctggccatcccaatcctggcatttgtggcttcatttcttctgtggccttcagcactgataagaatctattattggtactggcggaggacattgggcatgcaagtccgctatgttcaccatgaagactatcagttctgttattccttccggggcaggcctgggcacaaaccctccatcctcatgctccacggattctctggccacaaggatatgtggctcagtgtggtcaaagttccttccaaagaacctgcacttggtctgcgtggacatg

SEQ ID NO: 200 - DNA, 1233 bp, Homo sapiens
  misc_feature: Incyte ID No: LG:204626.1:2000MAY19
gcagaaccagattctccaggtgtgaagtaagcaatctattttcacttgctattaacagcaaacgtacaactttatctcttatttgacttcattatttggctttcaaattaacaacatgaaaactatacagaaattagtctgtgccctataagacagagatttagataatttgttcaaaacatgagatgatattcagatattctctcaaaggcaggactccaacaccgcaggtggaaaaccaacaaaaggaagaaaacagaaaggtgggggagataaggagtagccaggaaaaagaaaatagtgataaaggaagagccaaaaaggaggaaagggaagatgaaagaccgacttcaagaactaaagcagagaacaaaggaaattgaactctctagagacagtcatgtatcaactacagaaacagaggaacaaggggtgtttctacagcaagctgttatttatgaaagagagcctgtagctgagagacacctacatgaaatccaaaaactacaggaaagtattaacaatttggcagataatgttcaaaaatttgggcagcaacagaaaagtctggtggcttcaatgagaaggtttagtctacttaagagagagtctaccattacaaaggagataaaaattcaggcagaatacatcaacagaagtttgaatgatttagttaaagaagttaaaaagtcagaggttgaaaatggtccatcttcagtggtcacaaggatacttaaatctcagcatgctgcaatgttccgccattttcagcaaatcatgtttatatacaatgacacaatagcagcaaagcaagagaagtgcaagacatttattttacgtcagcttgaagttgctggaaaagagatgtctgaagaagatgtaaatgatatgcttcatcaaggaaaatgggaagtttttaatgaaagcttacttacagaaatcaatatcactaaagcacaactttcagagattgaacagagacacaaggaacttgttaatttggagaaccaaataaaggatttaagggatcttttcattcagatatctcttttagtagaggaacaaggagagagcatcaacaatattgaaatgacagtgaatagtacaaaagagtatgttaacaatactaaagagaaatttggactagctgtaaaatacaaaaaaagaaatccttgcagagtactgtgttgttggtgctgtccatgctgtagctcaaaataaagaagctatttt

SEQ ID NO: 201 - DNA, 1002 bp, Homo sapiens
  misc_feature: Incyte ID No: LI:007401.1:2000MAY01
gcggccgctttgccggtcattcccgaagcccggcaactgagggcggccccctttccttaacagtctcctcgctacagatcgtctgctccctcagcctcgcccgagacccacttccccagtctcgcccgggtggaggtcgacgaggaggagacaagagtcacccttcctccaggcggcgccggcccccctcacccgcgggtgtgtcctataaatggcgtcggaaagcgacaccgaggaattctatgatgcccctgaagatgtgcacctagggggcggctaccccgtggggtctccaggaaaagttgggctttcaacattcaaggaaacagagaacactgcatacaaagttggaaatgagtcccctgtacaagaattgaaacaagatgtgtctaacaagattatcgaaagtattatcgaggagagtcagaaagtactacagcttgaagatgactctttggattccacaggaaaagaactctctgatcaagctactgccagtcctattgtggctagaacagatctgagcaatatacccggactgttagccatagatcaagtactaccggaagaatcccaaaaggcagagagtcagaatacatttgaagagactgaattagaatttaaaaaaatgctttccttctgatgaaacctgtgagaaaccagtagatgaaaccacgaagttaactcaaacaagttcaactgagcagcttaatgtgcttgaaactgaaacagaagtattgaacaaggaagcagtggaagtcaaaggaggtggtgatgttttagagcctgtgtcctcagactccttatctactaaagattttgccgctgtggaagaagtggcccctgccaaacccccaagacaccttactccagagcctgatatagtggctagtacaaagaagcctgttccagcacgcccacctcctccaactaatttcccacctcctagacccccacctccttctcgacctgctccaccaccaagaaaaaggaaaagcgaat

SEQ ID NO: 202 - DNA, 444 bp, Homo sapiens
  misc_feature: Incyte ID No: LI:476342.1:2000MAY01
ggacggacgcgcgtctccggtcccgtccgtaataacactgatccgatccacgccggccggcgatggagctcatcaagtccagggcgaccgtgtgcgcgctcctcctggcgctgctcctgctctcacactacgacggcgggacgacgacgacgatggtggcggaggcccgggtgtgcatgggcaagagccagcaccactcgttcccctgcatctccgaccgcctctgcagcaacgagtgcgtcaaggaggacggcgggtggaccgccggctactgccacctccgctactgcaggtgccagaaggcgtgctaagcaaagctcttcaaacacccttggcttgccagaactgaactctagtagtactaagtaacacccttggctagctgtgcacaacctacgtaccgtgcatgcatgtaatgtggtgtcatgtaacgtgacagcaata

SEQ ID NO: 203 - DNA, 1956 bp, Homo sapiens
  misc_feature: Incyte ID No: LI:1072759.1:2000MAY01
tctagatcgcgagcgggccgctttttttttcgcaacgggtttgccgccagcaacacaggtgtctgtgaacactaccccctaaaagtccaataactgggaacaggaaactgactcatattaacacttggtccgtcacttgtgacacggttgaatccgggcaaggtcccaccaattatgggccatctgattctaataaatgcggtggcatcgaacaaaagaaccattgaaaaatttgacgacaggaggctgctgagcatgggaaagggctccttcaagtatgccttgggtctctggataaactgaaaggctagagcgtgaacgtggtatcaccattgatatctccttgtgggaaccttctgagaaccagcaagtactatgtgactatcattgactgccccagcgacacagcagacctttactcaacacaacatgcattacagggtacatctcaggctgacttgtgctgtcctgattgttgctgctggtgttggtgaatttgacagctggtatctccaagcaatggggcggaacccggagagcatgcccttctggccgtacccactggggtgtgaaaccaactaatagctcggtgttaacaaaagtggattccactgagccaacctaaaggcccgaagaagatatgaggcaacttgttcacggaagtcagcgaggtacattaagaaaaatgggcttacaaccccgacacagtagcctttggtgccaatttctggttggaatggtgacaacattctggaagcaaggtgctatcattgccttggtttcaaggagatggaaagtcacccgtaagggatggcaatgccaggtgagaaccacgcttgcttgcaggctactagactgcatcctaccaccaaactcgtacaactgacaaggcccttgtgcccgtgcactctccaggatgtctacaaaattggtggtagttggtactgtgtcctgttgtgcgcgatgtggagactggtgttctcataacccgcgtatcggtaggtcacctgttgctccgagtcagacgttaacatctcgaagtaaacatctgtcgaaatgggccctgaaaggcttggagtgaagctcttcctgggggacaatgtgggcttcaatgtcaacgaatgtgtctgtcaagggactgttcgtcgtggcaacgttgctggtgacagcaaaaattgacccaccaatgggagcagacgtgtggcttcacatgctcaggtgattattccttgaaaccatccaggccaaataatgcgccggctatgctctctgtattggattgcctactctggctcactattgcatgcaggttttgctgagtctgaaggaaaagattgatcgccgttctggtataaaagtctggaagtatggccctaggataacgtgaagatctggtgatgctgcgcatgtgttgatatgggttcctggcaaggcccatgtgctgttgagagcttctctagactatccacctttggggtcgctttgctgttcgtgatatgtagactagacagttgcggtgggtgtctatctaatagtctagtggactaagataggctgctggtagctggtcataggtctacccaagtctgcccagaaagctcagaagggttaattggaatattatcccctaatacctgcctacccctactcttaatcagtgggtgaaagaacggttctcagaacctgtttgttttcaattggccaatttaaagttaagtagtaaaagactggtttaatgaataacaatgcatcgtaaaccccttcagaaggaacaggagaatgttttgtggaccactttggttttctatttttttgcgtgtggcagtttcaagttattagtttttaaaatcagtactttttaatggaaacaacttgaccaaaaattgtgtcacagaaattttgagacccattaaaaaaagttaaatgcagaaaaaaaaacaaaaaggtggcgggccg

SEQ ID NO: 204 - DNA, 1726 bp, Homo sapiens
  misc_feature: Incyte ID No: LG:998857.1:2000FEB18
ctccatgccactctgacaccctggcagtgcactgtgggtacacctcgaccccgcctcacggatgaggggtgctgagcggtcattggtgatggtgggacgaagcttgacagtggcaaaaggatttgtgcccctcgggaagagctcctgtggtgggtactgctctgaggacatcagtttcttgacgtcagtggcaactgctgtgctgcccatgctgctgcggcggctgctgggcaagggtggaggtgcagggctgggggcacggcttggcacccggcttggggtggagttgcccggccggtccaggaggtcatcgaggctgtggctgccccggagtgggtaggacctggaaggcagctcgttcccggggttcatgggtgtcatgggtgtcatgggggacatggaggtcatggaggtcatgggggtcatgggggtcatgggattcacgggcccctcctccagagccttcacgtacgcctcggggaaccaaccgctcgcggacgagccctccagcttgccgtagagccagccgttctgggcctcgggcaccaacacctccaccacgtccccagcggagaagcgcagcagcgtgtggttggcgccctcggagtgggagaccagggcgcggactctcctggcgcccccgccgccgcccgggcgctcgccaaaggagttggagcgcgagctttgggcgctgccgctgtagagcgaggaggccgacggcgtgcggggcagggagcgacggtctggctctagctgggacgcgggcctcgcgtcgggctcggtgccgtaggagccggagccgtgccggctgcggggggagctgaactctcccaggggcctcgggggcatgtccaggcaggtgggcgtcaggcggcccgaggggtagggcggccccagcgcggggcccagcaggccgggggagtgggcgcgcgacgggctgcggctggcctcagactgctccttccacagcagcacgcggttctggagcatcccccgggcccggccgaagaactgcaggaaggtgttggaaagtagcaggtgcttctctgctaggaagcgatagcgccgcttctcttccaattcagccgcccgctgactctcagacacgaaggcctgcatctgtgcgtgcagccggttcacactctccttcatctcccgcacgttcttgtctctcttgcgctccatgcgccacagctcagacatgcacttctccaggttggccgctcggtggcggtactcgagctcatagtgctggcggctgtctttgatgaactgcatgtccagcttggtgttcttctccatgtgctgcagcaggcctccatggaatgtctgcaccaccacctccaggtcagagttcaagtgccgctgggtgtcagacatctgcaccaagatctcccccagaatctgtgaggtggggctctgcagggcacgctccccaatcttctggatggcactgaagtagacctcggccgcctcggacagagcgtggaaggcacgcaggtagttgttgcccaggtacaccaggttctccagggcggggttaaactgctccatgatgctcttgtagatggccatggtggacctgtagaactggtccatctcgggggccatggaggggctgtcccgggtctgagcaggaggctgggagctggtggcgatggcacagccgggagcagtggtaggtagtccctcaggtgcccacgactcagctggcagcgaggaagcc

SEQ ID NO: 205 - DNA, 1595 bp, Homo sapiens
  misc_feature: Incyte ID No: LG:482261.1:2000FEB18
ctccacgttgcgatggatccttggacccacttttgttaactcttaaactttgtgtctttgtctttatttcttttctcattccctcgtctccaccgggaaggggagagcctgcgggtggtgtatcaggcaggttcccctacatctttggcacccaacacggtctcctcgaacccaggtgaagttacacctgagcgtggtcgttgtgaagaacggtctgtccaggaactcccgagaacgtgtggtcggccttgcggtaagcttgtgcactcggagcattccagggacaccatgggacaatccaaaagtaaacattctgcatatttacattttattaagctcctcttaaagagggcaggaattaaggctagcacagaaaatttgattactctgtttccaacagtagagcaatattgtccttggtttcctgaacatggtaccatggacttcaaagattgggaacaggtgggaattgccttaaaacaagtttgtaaggaaggaaaatttatccccctaacagcctggtcaaactgggctatagttaaagcagcctcggaaccgtttcaatcggaaaatgaggcttatcctccagcagaaagaatttctgcagaggaaggtggtgatgctgctgaaggaggagaggatagtgaagaagattttgaggaaaatacagacaaacctggagatgagttaatttcttttgaggagcacgtgggaccttcagctgctcctaaaatagagaagccatatatgccaagatgtttaaaacaaagaagggccttgaggagcagtcggctcctcattgggatcatccggagtggccgcctccaataaagcaatgtagcttggagccttggaggtctgaatctcaaatttgccctgtttcacgaatgaatgaattgtggcctcaggaaccacaagcgcatggtgtagcaccagtacaacataaggctgcactgccatctaatgttaatgaatcgccattacagtttattattcggcaggctagattagccggagatcttgatgcctggcagtttgcagtagttttgcaacccccacgacagcaaggtggagcccatcaagcggtatgggaaccattttcttttaagctgctcaaagatcttaaagcagctgttggtcagtatggtcccaattcgcctttcgtccgatcgctattgcaatctgtggctcagaataagctattgactccgtgtgattgggagattttaacgaaagttacactttcgccctcccaatttcttcagtttaagacttggtggaccgacgaggctcaaaatcagatcgaaaaaaccgtgctgctaatcctgctattgccattacatttgaacaacttctaggaatagggggtcaatggggaactgtaaacaaccatcaggacttcgagatgatgccattgaacaaattcgcaattgctgtttgagggcatgggagaaaattcaggatctgggaactacttatcagtcttttaattctattagacaaggctcaaaggaaccatatcctgatttcattgctcgccttcaagacgcagcacagaaggctctcactgatgaaagtgccaggaaggccgggtg

SEQ ID NO: 206 - DNA, 2006 bp, Homo sapiens
  misc_feature: Incyte ID No: LG:480328.1:2000FEB18
gccacaagcctcatatatcatgaccgaactcatgctggtgaaaagtcctatgaatgtaaagaatgtggggaaacttttagtcatgcttcacatcttattattcatgagagaattcataccagtgataaaccctatgaatgtaaaagatgtgggaaggcatttcactgtgcctcatatcttgttagacatgaaagcgttcatgctgatggaaatccctatatgtgtgaagagtgtgggaaagcttttaatagtagccatgaacttagtatacatcatagagttcatactggtgagaaaccctttaaatgtaacaaatgcagaaggtcctttaggcttagatccatccttgaagtacatcagagaattcatatttgatagagaaattgtggcatatacaggtagtaaagaaagcacattgtgtcaatggatttatcccactgaacaatttgaatgaagacaatgtggaatggctttgagatacagttcagtttttattaggcatcaatttgtattggtgtgaacttttcaaaatgtaaatcatatatgcagtttctttggtatgacctgtgttaactccagattcagagaatttataatgtatttttttaataacataagaaaacttttctgatattcctctagttttggattgccaaaatattcatagtagaggaaaactgagaaaacgtaggaaaccattctttatacttgcatgtaaacatcttccagcaacaatcatttattgttaaacctggaaaaagccattacacaggaaacctctgttgatataagcgatgatgggaaaggctatttagccactctgcatatttaatgctcatgatcaacatctgcttcctatagctgggatgatatgggggaagatatttatcccttctggggatcatatataaatgatgatagtagtacctacagtatagtgctgttagaattacatgagttagatgtggaggtcagagtggaagcaggtgtgagagggtcccgcagaagaaaacatggctgccaaagtgtttgagtccatcggcaagtttgggcctggccttagctgttgcaggaggcatggtgaactctgccttatgtaatgtggatgctgggcacagagctgccatctttgaccaattccgtggagtacagaacattgtggtaggggaagggactcactttctcatcccatgtgtacaaaaaccaattatctttgactgctgttctcaaccacgtagtgcgccagtcatcactggtagcaaagatttacagaatgtcaacatcacactgtgcatcctcttccggcccatcactagccagcttcctcgcatcttcaccagcattggagaggactacgatgagtgtgtgctgccgttcattaccacggagatcctcaagtcactggtggctcgctttgatgctggagaactaatcacccagagggagctggtctccagccaggtgagcaacaaccttatggagtgagcagccacctttgggctcattctggacgacgtgtctttgacacatctgaccttcttgaaggagttaacagacaggtggccccccaggaagcagagagcgccagatttgtggtggaaaaggcggccatcatctctgctgagggtgactccaaggcagctgagctgatcgccaactcactggccactgcaggggacggccagagcgagctgtgcaagctggaagctgcagaagacattgcataccagctctcatgctctcggaacatcacctgcctgccggcagggcagtccgtgctcctccagctgccctagtgaggccccagcctacctgcacctccgtgaggcaactgggccacagccccgatgattcgtaacaccacctttcgccctcaccccagaaatcactgaaatttcatgattggcttaaagtgaaggaagtaaaggtaaaatcacttcagatctctaaaaaacaaagaattacatgagttagtacatgaaaaaattatgggaaactacatgaaa

SEQ ID NO: 207 - DNA, 984 bp, Homo sapiens
  misc_feature: Incyte ID No: LG:311197.1:2000MAY19
gctctccacgtgcgcgactgcgaggctggacgctacgggctcctggaaaggagttaagatgccaaatttgatatctggagcacctggaaccttgcagagtgttttgaagaggaggttacaatgaaaaacaaaacaaaaaagaaattttgctctgcaagtctactgacaagtcccgtttccttcccacattccaatctatgtctgcctttgtgttcagcagacaccagcatttgccacaatgctgtcatccactgactttacatttgcttcctgggagcttgtggtccgcgttgaccatcccaatgaagagcagcagaaagacgtcacactgagagtatctggagaccttcacgttggaggagtgatgctcaagttagtagaacagatcaatatatcccaagactggtcagactttgctctttggtgggaacagaagcattgctggcttctgaaaacccactggaccctggacaaatatggggtccaggcagatgcaaagcttctcttcacccctcagcataaaatgctgcgccttcgtctgccgaatttgaagatggtgaggttgcgagtcagcttctcagctgtggtttttaaagctgtcagtgatatctgcaaaatcctgaatattagaagatcagaagagctttccttgttaaagccgtctggtgactattttaagaagaagaagaaaaaagacaaaaataataaggaacccataattgaagatattctaaacctggagagttctccaacagcttcaggttcatcagtaagtcctggtttatacagtaaaaccatgacccctatatatgaccccatcaatggaacaccagcatcatccaccatgacttggttcagtgacagccctttgacggaacaaaactgcagcatcctcgcattcagccaacccccccagtccccagaagcacttgcggatatgtaccagcctcggtctctggttgatacagccaagctcaatgcagg

SEQ ID NO: 208 - DNA, 565 bp, Homo sapiens
  misc_feature: Incyte ID No: LG:1054883.1:2000MAY19
  unsure 19: a, t, c, g, or other
gcagagtgcccctgaagangccgacagcccctgctccagtcacacccggaagctgactggtccacgcatggccgaagcatgaggaagctcatcgttagattcatttttcttaaattttggacttatacagtaagggcttcaactaaccttactcaaaatggggactgttcccagtgtatttatcaggtcaccgaagtaggacagcaaattaaaacaatctttctgttctatagttattatgaatgtatggaaacattaaaagaaacttgtttgtataatgccactcagtacaaggtatgtagcccgagaaatgaccgacctgatgcgtgttataacccatctgagcccgctgcaaccaccgtttttgaaataagaactggccttttgctaggtgatacaagtaaaataataactagaacagaagaaaaagaaatccccaagcaaataactttaagatttgatgcttgtgcagccattaatagtaaaaagctagaaataggatgtggttctcttaactgagaaaggagctaaagagtagaaaataaatatgtttgtcatgagtcag

SEQ ID NO: 209 - DNA, 567 bp, Homo sapiens
  misc_feature: Incyte ID No: LG:399395.1:2000MAY19
acagttcacacttactactgttgtagttataaattattcacttgttttaaataagcacatatatgatggctgagtgagaatgatctagaactatgccagggattagataaaaacacagagtaaaagttggccatatagtaacatttttgatgtccaaattggagaggaatccctcaaatgttcaaaaatataggaatgggtcgggtgtggtggctcatgcctgtaatcccagcactttgggaggccaaggcaggaagatcacttgagcccaggagttcaagaccagcctgggcaacacagtgagaccctgactcaaaaaataaaaagaaaagacaaaaatacaagaatggctaagcaaactagtgtacatcaacctggaggaatattatatagtcttttaaaataacaaatatgtagattgttaatacatgggaaaaggtatatgaaataggtggaaccaagcagaactgagtcccaaggtgggtgggaaagaggctgccatgctggctgaggtacctgagaacaatgaaaacaagtcatattaagaccaatatcaatatcccactg

SEQ ID NO: 210 - DNA, 971 bp, Homo sapiens
  misc_feature: Incyte ID No: LG:380497.2:2000MAY19
tcgccccgtccgctgcagtccgccggcgagggagttacgcacgtcctgattctcctggagtctccagcccgcccagtggccgcagtcacccaggtccagaggcggcggtatcacaggctctccgacatgtctatgctggctgaacgtcggcggaagcagaagtgggctgtggatcctcagaacactgcctggagtaatgacgattccaagtttggccagcggatgctagagaagatggggtggtctaaaggaaagggtttaggggctcaggagcaaggagccacagatcatattaaagttcaagtgaaaaataaccacctgggactcggagctaccatcaataatgaagacaactggattgcccatcaggatgattttaaccagcttctggccgaactgaacacttgccatgggcaggaaaccacagattcctcggacaagaaggaaaagaaatcttttagccttgaggaaaagtccaaaatctccaaaaaccgtgttcactatatgaaattcacaaaagggcgatgccagtccctccactccagaggagaacgaaaccacgacaaccagcgccttcaccatccaggagtactttgccaagcggatggcagcactgaagaacaagccccaggttccagttccagggtctgacatttctgagacgcaggtggaacgtaaaagggggaagaaaagaaataaagaggccacaggtaaagatgtggaaagttacctccagcctaaggccaagaggcacacggagggaaagcccgagagggccgaggcccaggagcgagtggccaagaagaagagcgcgccagcagaagagcagctcagaggcccctgctgggaccagagttccaaggcctctgctcaggatgcaggggaccatgtgcagccgcctgagggccgggacttcaccctgaaagccaaaaagaggagaggcgagaaaaagctgcaaaaaccagtagaga

SEQ ID NO: 211 - DNA, 486 bp, Homo sapiens
  misc_feature: Incyte ID No: LI:272913.22:2000MAY01
agcgcgacagcggcagcaccaagggaacggaaaatggcgcctcacggcccgggtagtcttacgaccctggtgccctgggctgccgccctgctcctcgctctgggcgtggaaagggctctggcgctacccgagatatgcacccaatgtccagggagcgtgcaaaatttgtcaaaagtggccttttattgtaaaacgacacgagagctaatgctgcatgcccgttgctgcctgaatcagaaggaccctggtccaaactttcatcaggcacataccactgtcatcatagacctgcaagcaaaccccctcaaaggtgacttggccaacaccttccgtggctttactcagctccagactctgatactgccacaacatgtcaactgttctggaggaattaatgcctggaatactatcacctcttatatagacaaccaaatctgtcaagggcaaaagaacctttgcaataacactggggacccagaaatgtgt

SEQ ID NO: 212 - protein, 115 aa, Homo sapiens
  misc_feature: Incyte ID No: LG:1040582.1.orf3:2000FEB18
ILATLSSPQPVLIAKGTMTASSVLLHTGQKMPLIGLGTWKSEPGQVKAAIKYALSVGYRHIDCASVYGNETEIGEALKESVGSGKAVPREELFVTSKLWNTKHHPEDVEPALRKT

SEQ ID NO: 213 - protein, 161 aa, Homo sapiens
  misc_feature: Incyte ID No: LG:453570.1.orf3:2000FEB18
CTLLRLIPSASHFKRFDRVRRFAPAAMATSSGPKEAPANNPGLQTEVDPATKGYFLQQTMLRVKDPKVSLDFYSRVMGMSLLKRLDFEEMKFSLYFLGYEDVTLAPDDHIKRTEWTFRQKATLELTHNWGTENDPEFKGYHNGNSDPRGFGHIGVTVDDVH

SEQ ID NO: 214 - protein, 332 aa, Homo sapiens
  misc_feature: Incyte ID No: LG:408751.3.orf2:2000FEB18
RDPGWQIRDRAGLAWNMLANSASVRILIKGGKVVNDDCTHEADVYIENGIIQQVGRELMIPGGAKVIDATGKLVIPGGIDTSTHFHQTFMNATCVDDFYHGTKAALVGGTTMIIGHVLPDKETSLVDAYEKCRGLADPKVCCDYALHVGITWWAPKVKAEMETLVREKGVNSFQMFMTYKDLYMLRDSELYQVLHACKDIGAIARVHAENGELVAEGAKEALDLGITGPEGIEISRPEELEAEATHRVITIANRTHCPIYLVNVSSISAGDVIAAAKMQGKVVLAETTTAHATLTGLHYYHQDWSHAAAYVTVPPLRLDTNTSTYLMSLLAK

SEQ ID NO: 215 - protein, 274 aa, Homo sapiens
  misc_feature: Incyte ID No: LI:090574.1.orf3:2000FEB01
ARNSARVPPRGTMSRLSWGYREHNGPIHWKEFFPIADGDQQSPIEIKTKEVKYDSSLRPLSIKYDPSSAKIISNSGHSFNVDFDDTENKSVLRGGPLTGSYRLRQVHLHWGSADDHGSEHIVDGVSYAAELHVVHWNSDKYPSFVEAAHEPDGLAVLGVFLQIGEPNSQLQKITDTLDSIKEKGKQTRFTNFDLLSLLPPSWDYWTYPGSLTVPPLLESVTWIVLKQPINISSQQLAKFRSLLCTAEGEAAAFLVHHLATIPCGSSSATCSGHC

SEQ ID NO: 216 - protein, 182 aa, Homo sapiens
  misc_feature: Incyte ID No: LI:229932.2.orf1:2000FEB01
KLPLPPGAFSGLWKNQEAFKHLYFEKFPGYYDTMDAGYMDEEGYLYVMSRVDDVINVAGHRISAGAIEESILSHGTVADCAVVGKEDPLKGHVPLALCVLRKDINATEEQVLEEIVKHVRQNIGPVAAFRNAVFVKQLPKTRSGKIPRSALSAIVNGKPYKITSTIEDPSIFGHVEEMLKQA

SEQ ID NO: 217 - protein, 359 aa, Homo sapiens
  misc_feature: Incyte ID No: LI:332176.1.orf2:2000FEB01
LIKRSKGKERPFVLTRSFFAGSQKYGAVWTGDNTAEWSNLKISIPMLLTLSITGISFCGADIGGFIGNPETELLVRWYQAGAYQPFFRGHATMNTKRREPWLFGEEHTRLIREAIRERYGLLPYWYSLFYHAHVASQPVMRPLWVEFPDELKTFDMEDEYMLGSALWVHPVTEPKATTVDVFLPGSNEVWYDYKTFAHGEGGCTVKIPVALDTIPVFQRGGSVIPIKTTVGKSTGWMTESSYGLRVALSTKGSSVGELYLDDGHSFQYLHQKQFLHRKFSFCSSVLINSFADQRGHYPSKCVVEKILVLGFRKEPSSVTTHSSDGKDQPVAFTYCAKTSILSLEKLSLNIATDWEVRII

SEQ ID NO: 218 - protein, 110 aa, Homo sapiens
  misc_feature: Incyte ID No: LI:403248.2.orf2:2000FEB01
SPFISLPCSALLKPSTEQPLYSSSLWGPAVDGCDCVAEGLWLPQLHVGDWLVFDNMGAYTVGMGSPFWGTQACHITYAMSRVAWEALRRQLMAAEQEDDVEGVCKPLSCG

SEQ ID NO: 219 - protein, 549 aa, Homo sapiens
  misc_feature: Incyte ID No: LG:220992.1.orf3:2000MAY19
RPVTSFSPLPGSCGGRLGTRTMLGRSLREVSAALKQGQITPTELCQKCLSLIKKTKFLNAYITVSEEVALKQAEESEKRYKNGQSLGDLDGIPIAVKDNFSTSGIETTCASNMLKGYIPPYNATVVQKLLDQGALLMGKTNLDEFAMGSGSTDGVFGPVKNPWSYSKQYREKRKQNPHSENEDSDWLITGGSSGGSAAAVSAFTCYAALGSDTGGSTRNPAAHCGLVGFKPSYGLVSRHGLIPLVNSMDVPGILTRCVDDAAIVLGALAGPDPRDSTTVHEPINKPFMLPSLADVSKLCIGIPKEYLVPELSSEVQSLWSKAADLFESEGAKVIEVSLPHTSYSIVCYHVLCTSEVASNMARFDGLQYGHRCDIDVSTEAMYAATRREGFNDVVRGRILSGNFFLLKENYENYFVKAQKVRRLIANDFVNAFNSGVDVLLTPTTLSEAVPYLEFIKEDNRTRSAQDDIFTQAVNMAGLPAVSIPVALSNQGLPIGLQFIGRAFCDQQLLTVAKWFEKQVQFPVIQLQELMDDCSAVLENEKLASVSLKQ

SEQ ID NO: 220 - protein, 264 aa, Homo sapiens
  misc_feature: Incyte ID No: LG:1094571.1.orf1:2000MAY19
RTPAARRPALRFGPPPPPTPLTLGTYFGCLRCPPAETQLLRRPAVFVGSAASGIRSGLWSASSGHWCAPAAGRAHAPVPRLVRGLGAASTAAPQDAQTGPQPMPRADCIMRHLPYFCRGQVVRGFGRGSKQLGIPTANFPEQVVDNLPADISTGIYYGWASVGSGDVHKMVVSIGWNPYYKNTKKSMETHIMHTFKEDFYGEILNVAIVGYLRPEKNFDSLESLISAIQGDIEEAKKRLELPEHLKIKEDNFFQVSKSKIMNGH

SEQ ID NO: 221 - protein, 701 aa, Homo sapiens
  misc_feature: Incyte ID No: LI:350754.4.orf3:2000MAY01
EEAEEGRNMAALGVQSINWQKAFNRQAHHTDKFSSQELILRRGQNFQVLMIMNKGLGSNERLEFIDTTGPYPSESAMTKAVFPLSNGSSGGWSAVLQASNGNTLTISISSPASAPIGRYTMALQIFSQGGISSVKLGTFILLFNPWLNVDSVFMGNHAEREEYVQEDAGIIFVGSTNRIGMIGWNFGQFEEDILSICLSILDRSLNFRRDAATDVASRNDPKYVGRVLSAMINSNDDNGVLAGNWSGTYTGGRDPRSWDGSVEILKNWKKSGFSPVRYGQCWVFAGTLNTALRSLGIPSRVITNFNSAHDTDRNLSVDVYYDPMGNPLDKGSDSVWNFHVWNEGWFVRSDLGPPYGGWQVLDATPQERSQGVFQCGPASVIGVREGDVQLNFDMPFIFAEVNADRITWLYDNTTGKQWKNSVNSHTIGRYISTKAVGSNARMDVTDKYKYPEGSDQERQVFQKALGKLKPNTPFAATSSMGLETEEQEPSIIGKLKVAGMLAVGKEVNLVLLLKNLSRDTKTVTVNMTAWTIIYNGTLVHEVWKDSATMSLDPEEEAEHPIKISYAQYERYLKSDNMIRITAVCKVPDESEVVVERDIILDNPTLTLEVLNEARVRKPVNVQMLFSNPLDEPVRDCVLMVEGSGLLLGNLKIDVPTLGPKERSRVRFDILPSRSGTKQLLADFSCNKFPAIKAMLSIDVAE

SEQ ID NO: 222 - protein, 150 aa, Homo sapiens
  misc_feature: Incyte ID No: LI:255828.29.orf2:2000MAY01
CTIGPASRSVETLKEMIKSGMNVARLNFSHGTHEYHAETIKNVRTATESFASDPILYRPVAVALDTKGPEIRTGLIKGSGTAEVELKKAATLKITLDNAYMEKCDENILWLDYKNICKVVEVSRLHHAVWRNSQRGLSSGGCAHAAPDSS

SEQ ID NO: 223 - protein, 234 aa, Homo sapiens
  misc_feature: Incyte ID No: LI:1190263.1.orf2:2000MAY01
AAGSLFPGLLIFSMILFIFLLGYAWFSSHTSPLYWDCLLMRGHEITEQPMKAERAGSIMVKEAISFLERHSKETFLLFFSFLHVHTPLPTTDDFTGTSKHGLYGDNVDEMDSMVGKILDAIDDFGLRNNTLVYFTSDHGGHLEARRGHAQLGGWNGIYKGGKGMGGWEGGIRVPGIVRWPGKVPAGRLIKEPTSLMDILPTVASVSGGSLPQDRVIDGRDLMPLLAGQRQALGA

SEQ ID NO: 224 - protein, 86 aa, Homo sapiens
  misc_feature: Incyte ID No: LG:270916.2.orf2:2000FEB18
KFSSNGLWPSTWLLTTRTLPMISRCSPMHLLTISSAFCLLCPPPRMPFQKCLLLSRYRSRGVLVAVIWGTTEASGISGLITALWEF

SEQ ID NO: 225 - protein, 173 aa, Homo sapiens
  misc_feature: Incyte ID No: LG:999414.3.orf2:2000FEB18
ILTSVSSSFWCPFFLSLLDSQLHSWIVLQLTIIKNVEISNLVCDPSQLLNLACSDSVIDSIFIYLDSTIFGFLPISGILLSYYKIVPSILRISSSDGKYKAFSTCRSHLAVVCLFYGTGIGVYLTSAVAPAPRSGVVVSVMYTVVTPMLNPFIYCLRKQGHSKRLWRCAAEQS

SEQ ID NO: 226 - protein, 68 aa, Homo sapiens
  misc_feature: Incyte ID No: LG:429446.1.orf2:2000FEB18
HLVATVRGFSKVFVSSRIKTVKLQIVLQMEPQMQSMTKIYHRPLDRPASPCSDVDDIEGAPPKEISTA

SEQ ID NO: 227 - protein, 70 aa, Homo sapiens [sequence omitted]

SEQ ID NO: 228 - protein, 117 aa, Homo sapiens [sequence omitted]

SEQ ID NO: 229 - protein, 294 aa, Homo sapiens [sequence omitted]

SEQ ID NO: 230 - protein, 326 aa, Homo sapiens
  misc_feature: Incyte ID No: LG:242665.1.orf1:2000FEB18
HHLISLYFTDFPISFFMFYANFSRRTGPAPPLRTTPRAWLRRECGASTMSAPGSPDQAYDFLLKFLLVGDRDVGKSEILESLQDGAAESPYSHLGGIDYKTTTILLDGQRVKLKLWDTSGQGRFCTIFRSYSRGAQGVILVYDIANRWSFEGMDRWIKKIEEHAPGVPKILVGNRLHLAFKRQVPREQAQAYAERLGVTFFEVSPLCNFNIIESFTELARIVLLRHRMNWLGRPSKVLSLQDLCCRTIVSCTPVHLVDKLPLPSTLRSHLKSFSMAKGLNARMMRGLSYSLTTSSTHKRSSLCKVKIVCPPQSPPKNCTRNSCKIS

SEQ ID NO: 231 - protein, 182 aa, Homo sapiens
  misc_feature: Incyte ID No: LG:241743.1.orf1:2000FEB18
KSGTPRRALLLFLVFKIRGSPVSHLMPRLKESRSHESLLSPSSAVEALDLSMEEEVVIKPVHSSILGQDYCFEVTTSSGSKCFSCRSAAERDKWMENLRRAVHPNKDNSRRVEHILKLWVIEAKDLPAKKKYLCELCLDDVLYARTTGKLKTDNVFWGEHFEFHNLPPLRTVTVHLYRETDK

SEQ ID NO: 232 - protein, 358 aa, Homo sapiens
  misc_feature: Incyte ID No: LI:034212.1.orf1:2000FEB01
  unsure 25: unknown or other
NSSLTQLRRLEELDLGNNEIYNLPXSIGALLHLKDLWLDGNQLSELPQEIGNLKNLLCLDVSENRLERLPEEISGLTSLTDLVISQNLLETIPDGIGKLKKLSILKVDQNRLTQLPEAVGECESLTELVLTENQLLTLPKSIGKLKKLSNLNADRNKLVSLPKEIGGCCSLTVFCVRDNRLTRIPAEVSQATELHVLDVAGNRLLHLPLSLTALKLKALWLSDNQSQPLLTFQTDTDYTTGEKILTCVLLPQLPSEPTCQENLPRCGALENLVNDVSDEAWNERAVNRVSAIRFVEDEKDEEDNETRTLLRRATPHPGELKHMKKTVENLRNDMNAAKGLDSNKNEVNHAIDRVTTSV

SEQ ID NO: 233 - protein, 194 aa, Homo sapiens
  misc_feature: Incyte ID No: LG:344886.1.orf1:2000MAY19
EKMGKGCKVVVCGLLSVGKTAILEQLLYGNHTIGMEDCETMEDVYMASVETDRGVKEQLHLYDTRGLQEGVELPKHYFSFADGFVLVYSVNNLESFQRVELLKKEIDKFKDKKEVAIVVLGNKIDLSEQRQVDAEVAQQWAKSEKVRLWEVTVTDRKTLIEPFTLLASKLSQPQSKSSFPLPGRKNKGNSNSEN

SEQ ID NO: 234 - protein, 222 aa, Homo sapiens
  misc_feature: Incyte ID No: LG:228930.1.orf2:2000MAY19
AQMAGAQPGVHALQLKPVCVSDSLKKGTKFVKWDDDSTIVTPIILRTDPQGFFFYWTDQNKETELLDLSLVKDARCGRHAKAPKDPKLRELLDVGNIGRLEQRMITVVYGPDLVNISHLNLVAFQEEVAKEWTNEVFSLATNLLAQNMSRDAFLEKAYTKLKLQVTPEGRIPLKNIYRLFSADRKRVETALEACSLPSSRVEKANEAAKSEQSCGKAPPKHF

SEQ ID NO: 235 - protein, 185 aa, Homo sapiens
  misc_feature: Incyte ID No: LG:338927.1.orf3:2000MAY19
LRSTPETGRMKGASEEKLASVSNLVTVFENSRTPEAAPRGQRLEDVHHRPECRPPESPGPREKTNVGEAVGSEPRTVSRRYLNSLKNKLSSEAWRKSCQPVTLSGSGTQEPEKKIVQELLETEQAYVARLHLLDQVFFQELLKTARSSKAFPEDVVRVIFSNISSIYQFHSQFFLPELQRRLDDW

SEQ ID NO: 236 - protein, 192 aa, Homo sapiens [sequence omitted]

SEQ ID NO: 237 - protein, 61 aa, Homo sapiens [sequence omitted]

SEQ ID NO: 238 - protein, 335 aa, Homo sapiens
  misc_feature: Incyte ID No: LI:001496.2.orf2:2000MAY01
RCGAAASAGRESAAGSEEQAGLRPSQLRGPPDPPTETAAVSGQAVGAAWPAAGKMFSVESLERAELCESLLTWIQTFNVGCTMPEPVEDLTNGVVMAQVLQKIDPAYFDENWLNRIKTEVGDNWRLKISNLKKILKGILDYNHEILGQQINDFTLPDVNLIGEHSDAAELGRMLQLILGCAVNCEQKQEYIQAIMMMEESVQHVVMTAIQELMSKESPVSAGNDAYVDLDRQLKKTTEELNEALSAKEEIAQRCHELDMQVAALQEEKSSLLAENQVLMERLNQSDSIEDPNSPAGRRHLQLQTQLEQLQEETFRLEAAKDDYRIRCEELEKGDL

SEQ ID NO: 239 - protein, 346 aa, Homo sapiens
  misc_feature: Incyte ID No: LI:1085273.2.orf1:2000MAY01
ARAGSPPRPPRPRRPAHCSRACAACTSPRTACRTLTASSAPSPWTSSLPTPLAGGPTAPGPPTPARPRSSASWTARRGPRWACPRPARTARTPRLRRGPRPRRRPRPPAGSPARSPAHSLGLNFGDAARQTPRHGLSALSAPGLPGPGQPAGPGAWAPPLDSPGTPSPDGPWCFSPEGAQGAGGVLFAPFGRAGAPGPGGGSDLRRREAARAEPRDARTGWPEEPAPETQFKRRSCQMEFEEGMVEGRARGEELAALGKQASFSGNVEVIQVVSDPSAAFGPAARSQARNKCILYIMQRKVNGLTGNFNPRSKIISIFYLFKLFILAMDLATVRVVLELPFLLSGI

SEQ ID NO: 240 - protein, 298 aa, Homo sapiens
  misc_feature: Incyte ID No: LI:333138.2.orf3:2000MAY01
ATWAFISAPVPVFPDSFGIKASSEASTLEAMGRKEEDDCSSWKKQTTNIRKTFIFMEVLGSGAFSEVFLVKQRLTGKLFALKCIKKSPAFRDSSLENEIAVLKKIKHENIVTLEDIYESTTHYYLVMQLVSGGELFDRILERGVYTEKDASLVIQQVLSAVKYLHENGIVHRDLKPENLLYLTPEENSKIMITDFGLSKMEQNGIMSTACGTPGYVAPEVLAQKPYSKAVDCWSIGVITYILLCGYPPFYEETESKLFEKIKEGYYEFESPFWDDISESAKDFICHLLEKDPNEGVTL

SEQ ID NO: 241 - protein, 133 aa, Homo sapiens
  misc_feature: Incyte ID No: LI:338927.1.orf1:2000MAY01
DPPRETGRMKGASEEKLASVSNLVTVFENSRTPEAAPRGQRLEDVHHRPECRPPESPGPREKTNVGEAVGSEPRTVSRRYLNSLKNKLSSEAWRKSLPACDPLRIGDAGAREEDRPGAAWRHDAGHMWRASTC

SEQ ID NO: 242 - protein, 354 aa, Homo sapiens
  misc_feature: Incyte ID No: LG:335558.1.orf2:2000FEB18
  unsure 341: unknown or other
LIGVLQVLQVELGINSVTGTSTVNNVNITAVGSFNPNVTSSMLGNVNISTSNIPSAAGVSVGPGVTSGVNVNILSGMGNGTISSSAAVSSVPNAAAGMTGGSVSSQQQQPTVNTSRFRVVKLDSSSEPFKKGRWTCTEFYEKENAVPATEGVLINKVVETVKQNPIEVTSERESTSGSSVSSSVSTLSHYTESVGSGEMGAPTVVVQQQQQQQRLLQQQPALQGVTLQQMDFGSTGPQSIPAVSIPQSISQSQISQVQLQSQELSYQQKQGLQPVPLQATMSAATGIQPSPVNVVGVTSALGQQPSISSLAQPQLPYSQAAPPVQTPLPGAPPPQQLQYGXQQPMVSTQMAPGM

SEQ ID NO: 243 - protein, 237 aa, Homo sapiens
  misc_feature: Incyte ID No: LG:998283.7.orf1:2000FEB18
LYCICKTPYDESKFYIGCDLCTNWYHGECVGITEKEAKKMDVYICNDCKRAQEGSSEELYCICRTPYDESQFYIGCDRCQNWYHGRCVGILQSEAELIDEYVCPQCQSTEDAMTVLTPLTEKDYEGLKRVLRSLQAHKMAWPFLEPVDPNDAPDYYGVIKEPMDLATMEERVQRRYYEKLTEFVADMTKIFDNCRYYNPSDSPFYQCAEVLESFFVQKLKGFKASRSHNNKLQSTAS

SEQ ID NO: 244 - protein, 161 aa, Homo sapiens
  misc_feature: Incyte ID No: LI:402739.1.orf1:2000FEB01
PPWGQRSPTPPSDTGGTSRPRTMIPPGECTYAGRKRRRPLQKQRPAVGAEKSNPSKRHRDRLNAELDHLASLLPFPPDIISKLDKLSVLRLSVSYLRVKSFFQGQGLAVADAEDVDDHTGERRPMSFRRPRALDTQALRRTQFGLHLLMVNIAGLIATDRL

SEQ ID NO: 245 - protein, 151 aa, Homo sapiens
  misc_feature: Incyte ID No: LI:175223.1.orf3:2000FEB01
IDAEDHSVPKGKFSSHEFGAEGPWGNMAEGGASKGGGEEPGKLPEPAEEESQVLRGTGHCKWFNVRMGFGFISMINREGSPLDIPVDVFVHQSKLFMEGFRSLKEGEPVEFTFKKSSKGLESIRVTGPGGSPCLGSERRPKGKTLQKRKPK

SEQ ID NO: 246 - protein, 160 aa, Homo sapiens
  misc_feature: Incyte ID No: LG:981076.2.orf2:2000MAY19
  unsure 157: unknown or other
MASKVTDAIVWYQKKIGAYDQQIWEKSVEQREIKGLRNKPKKTAHVKPDLIDVDLVRGSAFAKAKPESPWTSLTRKGIVRVVFFPFFFRWWLQVTSKVIFFWLLVLYLLQVAVIVLFCSTSSPHSIPLTEVIGPIWLMLLLGTVHCQIVSTRTPKPXLST

SEQ ID NO: 247 - protein, 160 aa, Homo sapiens
  misc_feature: Incyte ID No: LI:1008973.1.orf3:2000MAY01
LHIPRSPPGDRAARTGHPRLPVPPPRARTEPRPRGQRRLHSSGEMAAGSTTLRAVGKLQVRLATKTEPKKLEKYLQKLSALPMTADILAETGLRKTVKRLRKHQHVGDFARDLAARWKKLVLVDRNTGPDPQDPEESASRQRYGEALQEREKGWGLPRKR

SEQ ID NO: 248 - protein, 171 aa, Homo sapiens
  misc_feature: Incyte ID No: LI:1190250.1.orf1:2000MAY01
RAHSGVLMSAMLSHGVLKRASERGAERHSLPPSRLVLVPGRRALRSAPQVPGSGWRVGTEPPVLHDPAGRGRFPQSGEVSAAPEMSKLSFRARALDASKPLPVFRCEDLPDLHEYASINRAVPQMPTGIEKEEESEHHLPAGLFQHSRCMARRGIYMVIPVPEAESNYCLL

SEQ ID NO: 249 - protein, 449 aa, Homo sapiens
  misc_feature: Incyte ID No: LG:021371.3.orf2:2000FEB18
PGMSVAGVEGEPLVSSQSGQSPPEPQDPEAPSSSGPGHLVAMGKVSRTPVEAGVSQSDAENAAPSCPDEHDTLPRRRGRPSRRFLGKKYRKYYYKSPKPLLRPFLCRICGSRFLSHEDLRFHVNSHEAGDPQLFKCLQCSYRSRRWSSLKEHMFNHVGSKPYKCDECSYTSVYRKDVIRHAAVHSRDRKKRPDPTPKLSSFPCPVCGRVYPMQKRLTQHMKTHSTEKPHMCDKCGKSFKKRYTFKMHLLTHIQAVANRRFKCEFCEFVCEDKKALLNHQLSHVSDKPFKCSFCPYRTFREDFLLSHVAVKHTGAKPFACEYCHFSTRHKKNLRLHVRCRHASSFEEWGRRHPEEPPSRRRPFFSLQQIEELKQQHSAAPGPPPSSPGPPEIPPEATTFQSSEAPSLLCSDTLGGATIIYQQGAEESTAMATQTALDLLLNMSAQRELGG

SEQ ID NO: 250 - protein, 127 aa, Homo sapiens
  misc_feature: Incyte ID No: LG:475404.1.orf2:2000FEB18
LTPGHPGSRGMDSVAFEDVAVNFTQEEWALLDSSQKNLYREVMQETCRNLASVGSQWKDQNIEDHFEKPGKDIRNHIVQRLCESKEDGQYGEVVSQIPNLDLNENISTGLKPCECSICGKVFVRHSL

SEQ ID NO: 251 - protein, 157 aa, Homo sapiens
  misc_feature: Incyte ID No: LG:979406.2.orf1:2000FEB18
  unsure 136: unknown or other
NSLSVASAPPQRDPGMAMALPMPGPQEAVVFEDVAVYFTRIEWSCLAPDQQALYRDVMLENYGNLASLGFLVAKPALISLLEQGEEPGALILQVAEQSVAKASLCTEDPNTLPSRSQEGSPASSEGGPGEKGVAGXVAGGGAASSWPHGEHPVTPNR

SEQ ID NO: 252 - protein, 305 aa, Homo sapiens
  misc_feature: Incyte ID No: LG:410726.1.orf1:2000FEB18
DTMQAVVPLNKMTAISPEPQTLASTEQNEVPRVVTSGEQEAILRGNAADAESFRQRFRWFCYSEVAGPRKALSQLWELCNQWLRPDIHTKEQILELLVFEQFLTILPGEIRIWVKSQHPESSEEVVTLIEDLTQMLEEKDPVSQDSTVSQEENSKEDKMVTVCPNTESCESITLKDVAVNFSRGEWKKLEPFQKELYKEVLLENLRNLEFLDFPVSKLELISQLKWVELPWLLEEVSKSSRLDESALDKIIERCLRDDDHGLMEESQQYCGSSEEDHGNQGNSKGRVAQYKTLGSGSRGKKFDPD

SEQ ID NO: 253 - protein, 717 aa, Homo sapiens
  misc_feature: Incyte ID No: LG:200005.1.orf2:2000FEB18
ECSRVTVTEHWSKVFPKGQGSQEHLLKLMTMGDMKTPDFDDLLAAFDIPDMVDPKAAIESGHDDHESHMKQNAHGEDDSHAPSSSDVGVSVIVKNVRNIDSSEGGEKDGHNPTGNGLHNGFLTASSLDSYSKDGAKSLKGDVPASEVTLKDSTFSQFSPISSAEEFDDDEKIEVDDPPDKEDMRSSFRSNVLTGSAPQQDYDKLKALGGENSSKTGLSTSGNVEKNKAVKRETEASSINLSVYEPFKVRKAEDKLKESSDKVLENRVLDGKLSSEKNDTSLPSVAPSKTKSSSKLSSCIAAIAALSAKKAASDSCKEPVANSRESSPLPKEVNDSPRAADKSPESQNLIDGTKKPSLKQPDSPRSISSENSSKGSPSSPAGSTPAIPKVRIKTIKTSSGEIKRTVTRVLPEVDLDSGKKPSEQTASVMASVTSLLSSPASAAVLSSPPRAPLQSAVVTNAVSPAELTPKQVTIKPVATAFLPVSAVKTAGSQVINLKLANNTTVKATVISAASVQSASSAIIKAANAIQQQTVVVPASSLANAKLVPKTVHLANLNLLPQGAQATSELRQVLTKPQQQIKQAIINAAASQPPKKVSRVQVVSSLQSSVVEAFNKVLSSVNPVPVYIPNLSPPANAGITLPTRGYKCLECGDSFALEKSLTQHYDRRSVRIEVTCNHCTKNLVFYNKCSLLSHARGHKEKGVVMQCSHLILSQSQQIK

SEQ ID NO: 254 - protein, 211 aa, Homo sapiens
  misc_feature: Incyte ID No: LG:1076828.1.orf1:2000FEB18
  unsure 25, 54, 93, 113, 116, 121: unknown or other
TPKPQVISLLEQGKEPWMVGRELTXGLCSDLESMCETKLLSLKKEVYEIELCQXEIMGLTKHGLEYSSFGDVLEYRSHLAKQLGYPNGHFSQXIFTPEYMPTFIQQTFLTLHXIIXNEDRXYECKECGKMFSHGSQLTQHQRIHTGEKPYQCKECGKAFNRGSLLTRHQRIHTGEKPYECKECGKTFSRGSELTQHERIHTAGAPLLSWGL

SEQ ID NO: 255 - protein, 103 aa, Homo sapiens
  misc_feature: Incyte ID No: LG:1076931.1.orf2:2000FEB18
GGEGQSADLRPLLTDFRLQFICAPASSLSLRRLRLRPQKEISILCPEQNRMAMSQESLTFKDVFVGFTLEEWQQLDPSQRALYRDVMLENYSNLVSVGYCAHK

SEQ ID NO: 256 - protein, 84 aa, Homo sapiens
  misc_feature: Incyte ID No: LG:1078121.1.orf3:2000FEB18
EGIPEKKEEEEEMAGSQGLLIFRDVAIEFSPEEWSYLDPAQQNLYRDVMLENYRNLVSLGIAVSKPELITCLEQRNEPWNVKKH

SEQ ID NO: 257 - protein, 194 aa, Homo sapiens
  misc_feature: Incyte ID No: LG:1079203.1.orf1:2000FEB18
DARTTWKPRNVIYSHFTEDLWPEHSIKDSFQKVILRGYGKCGHENLQLRISCKSVDESKVFKEGYNELNQCLRTTQSKIFQCDKYVKVFHKFSNSNSHKKRNTGKKVFKCKECGKSFCMLSHLTQHIRIHTRENSYKCKECGKVLNQSSELIKHKKIHTGEKPYTCEKCGKTFNQSANLYAHKKIHTGDKTIQV

SEQ ID NO: 258 - protein, 129 aa, Homo sapiens
  misc_feature: Incyte ID No: LG:1082586.1.orf1:2000FEB18
  unsure 5: unknown or other
AQPRXPMGQYQADQYIHRRSSSRREKGAERILEEIMAENFSSLIKDMNINIQEAQQTPSMMNSKIATLRHIIIKLSKDKHRPLSLTAARAPSLVFTSLFLLLLEAQPLWPCDLQVLGDPLLRCQDPLEA

SEQ ID NO: 259 - protein, 93 aa, Homo sapiens
  misc_feature: Incyte ID No: LG:1082774.1.orf3:2000FEB18
PAGIRRVTARTPGPPGSLEMGPLQFRDVAIEFSLEEWHCLDAAQRNLYRDVMLENYRNLIFLGIVVSKPNLITCLEQGKKPLTMKRHEMIAKP

SEQ ID NO: 260 - protein, 193 aa, Homo sapiens
  misc_feature: Incyte ID No: LG:1082775.1.orf3:2000FEB18
KHEIIHFEEEPSEYNNNGNSFWLNEDLIWHQKIKNWEQPFEYNECGKAFPENSLFLVHKRAYTGQKTCKYTEHGKTCYMSFFITHQQTHPRENHYECNECGESIFEESILFEHQNVYPFSQNLNPTLIQRTHSISNIIEYNECGTFFSEKLALHLQQRTHPGEKPYECHECGKTFTQKSAHTRHQRTHTGKTL

SEQ ID NO: 261 - protein, 111 aa, Homo sapiens
  misc_feature: Incyte ID No: LG:1083120.1.orf3:2000FEB18
PGLRDLTCKELLILTEREAQKRKKRKEKESGMALTQGPLTFRDVAIEFSQEEWKSLDPVQKALYWDVMLENYRNLVFLGKDNFALEVKICPRVFLYFLCCLSVGARSIHLH

SEQ ID NO: 262 - protein, 137 aa, Homo sapiens [sequence omitted]

SEQ ID NO: 263 - protein, 68 aa, Homo sapiens
  misc_feature: Incyte ID No: LG:1090915.1.orf3:2000FEB18
MFPVLEPHQVGLIRSYNSKTMTCFQELVTFRDVAIDFSRQEWECLDPNQRDLYRDVMLENYRNLVSLG

SEQ ID NO: 264 - protein, 101 aa, Homo sapiens
  misc_feature: Incyte ID No: LG:1094230.1.orf3:2000FEB18
DTGTSWKPKMGPLQFRDVAIEFSLEEWHCLDTAQRNLYRNVMLENYSNLVFLGITVSKPDLITCLEQGRKPLTMKRNEMIAKPSVSFLQVHSESQSPLHDI

SEQ ID NO: 265 - protein, 96 aa, Homo sapiens
  misc_feature: Incyte ID No: LG:474848.3.orf1:2000FEB18
SAAMFPVFSGCFQELQEKNKSLELVSFEEVAVHFTWEEWQDLDDAQRTLYRDVMLETYSSLVSLGHCITKPEMIFKLEQGAEPWIVEETLNLRLSG

SEQ ID NO: 266 - protein, 251 aa, Homo sapiens
  misc_feature: Incyte ID No: LI:251656.1.orf2:2000FEB01
  unsure 234: unknown or other
ENGENCNQDMFENESRKIFSEMPEGESAQHSDGESDFERDAGIQRLQGHTPGEDHGEVVSQDREVGQLIGLQGTYLGEKPYECPQCGKTFSRKSHLITHERTHTGEKYYKCDECGKSFSDGSNFSRHQTTHTGEKPYKCRDCGKSFSRSANLITHQRIHTGEKPFQCAECGKSFSRSPNLIAHQRTHTGEKPYSCPECGKSFGNRSSLNTHQGIHTGEKPYECKECGESFSYNXNLIRQQRIHTGEKPYKC

SEQ ID NO: 267 - protein, 522 aa, Homo sapiens
  misc_feature: Incyte ID No: LI:021371.1.orf3:2000FEB01
PGMSVAGVEGEPLVSSQSGQSPPEPQDPEAPSSSGPGHLVAMGKVSRTPVEAGVSQSDAENAAPSCPDEHDTLPRRRGRPSRRFLGKKYRKYYYKSPKPLLRPFLCRICGSRFLSHEDLRFHVNSHEAGDPQLFKCLQCSYRSRRWSSLKEHMFNHVGSKPYKCDECSYTSVYRKDVIRHAAVHSRDRKKRPDPTPKLSSFPCPVCGRVYPMQKRLTQHMKTHSTEKPHMCDKCGKSFKKRYTFKMHLLTHIQAVANRRFKCEFCEFVCEDKKALLNHQLSHVSDKPFKCSFCPYRTFREDFLLSHVAVKHTGAKPFACEYCHFSTRHKKNLRLHVRCRHASSFEEWGRRHPEEPPSRRRPFFSLQQIEELKQQHSAAPGPPPSSPGPPEIPPEATTFQSSEAPSLLCSDTLGGATIIYQQGAEESTAMATQTALDLLLNMSAQRGPGGTALQVCCLGTCSPSQLPQYPALHWTLGLEENSVSELLRPWGLPGSGGDRSAEVWWANREEQALPRRPQGIPSI

SEQ ID NO: 268 - protein, 267 aa, Homo sapiens
  misc_feature: Incyte ID No: LI:133095.1.orf2:2000FEB01
  unsure 36: unknown or other
GLGEEVPCAMMEGVAAYTQTEPEGSQPSTMDATAVXGIETKKEKEDLCLLKKEEKEEPVAPELATTVPESAEPEAEADGEELDGSDMSAIIYEIPKEPEKRRRSKRSRVMDADGLLEMFHCPYEGCSQVYVALSSFQNHVNLVHRKGKTKVCPHPGCGKKFYLSNHLRRHMIIHSGVREFTCETCGKSFKRKNHLEVHRRTHTGETPLQCEICGYQCRQRASLNWHMKKHTAEVQYNFTCDRCGKRFEKLDSVKFHTLKSHPDHKPT

SEQ ID NO: 269 - protein, 286 aa, Homo sapiens [sequence omitted]

SEQ ID NO: 270 - protein, 194 aa, Homo sapiens
  misc_feature: Incyte ID No: LI:200009.1.orf3:2000FEB01
GLSPKAANLAPTTQQRSVVFPQTPCSRNFSLLDKSGPIESGFNQINVKNQRVLASPTSTSQLHSEFSDWHLWKCGQCFKTFTQRILLQMHVCTQNPDRPYQCGHCSQSFSQPSELRNHVVTHSSDRPFKCGYCGRAFAGATTLNNHIRTHTGEKPFKCERCERSFTQATQLSRHQRMPNECKPITESPESIEVD

SEQ ID NO: 271 - protein, 263 aa, Homo sapiens
  misc_feature: Incyte ID No: LI:758502.1.orf3:2000FEB01
TLIKHQRTHTGERPYECPECGKTFGRKPHLIMHQRTHTGEKPYACLECHKSFSRSSNFITHQRTHTGVKPYRCNDCGESFSQSSDLIKHQRTHTGERPFKCPECGKGFRDSSHFVAHMSTHSGERPFSCPDCHKSFSQSSHLVTHQRTHTGERPFKCENCGKGFADSSALTKHQRIHTGERPYKCGECGKSFNQSSHFITHQRIHLGDRPYRCPECGKTFNQRSHFLTHQRTHTGEKPFHCSKCNKSFRQKAHLLCHQDTHLI

SEQ ID NO: 272 - protein, 142 aa, Homo sapiens
  misc_feature: Incyte ID No: LI:344772.1.orf2:2000FEB01
  unsure 142: unknown or other
AKNLFKMDIEDCNGRSYVSGSGDSSLEKEFLGAPVGPSVSTPNSQHSSPSRSLSANSIKVEMYSDEESSRLLGPDERLLEKDDSVIVEDSLSEPLGYCDGSGPEPHSPGGIRLPNGKLKCDVCGMVCIGPNVLMVHKRSHTX

SEQ ID NO: 273 - protein, 164 aa, Homo sapiens
  misc_feature: Incyte ID No: LI:789445.1.orf2:2000FEB01
EHREAKASGWVTDGLLMDSSQHLVTFEDVAVDFTQEEWTLLDQAQRDLYRDVMLENYKNLIILAGSELFKRSLMSGLEQMEELRTGVTGVLQELDLQLKTKGSPLLQDISAERSPNGVQLERSNTAEKLYDSNHSGKVFNEHPFLMTHMITHIGEKTSEDNQSG

SEQ ID NO: 274 - protein, 107 aa, Homo sapiens
  misc_feature: Incyte ID No: LI:789657.1.orf2:2000FEB01
  unsure 5: unknown or other
MWQVXSKSSHLAVHQRIHTGEKPYKCNRCGKCFSQSSSLARHQTVHTGEKPYICAECGKAFSQKSDLVVHQIIHTGEKPDRCTVCGKAFIQKSQLTVHQRIHTLMKS

SEQ ID NO: 275 - protein, 105 aa, Homo sapiens
  misc_feature: Incyte ID No: LI:789808.1.orf3:2000FEB01
EHTDGKSYACIQCGKFFCCYYSFTEHLRRHTGEKPFGCNECGKTFHQKLALIVHQRTHIRQKPYGCNECGKSFCVKSKLIAHHRTYTGEKPYECNVCGKLLLSQN

SEQ ID NO: 276 - protein, 149 aa, Homo sapiens
  misc_feature: Incyte ID No: LI:792919.1.orf1:2000FEB01
HQMIHMGQNPYNCKECGKSFKWSSYLLVHQRVHTGEKPYKCEECGKGYISKSGLDFHHRTHTGERSYNCDNCGKSFRHASSILNHKKLHCQRKPLKCEDCGKRLVCRSYCKDQQRDHSGENPSKCEDCGKRYKRRLNLDIILSLFLNDI

SEQ ID NO: 277 - protein, 101 aa, Homo sapiens
  misc_feature: Incyte ID No: LI:793949.1.orf3:2000FEB01
DTGTSWKPKMGPLQFRDVAIDFSQEEWHCLDTAQRDLYRCVMLENYSNLVFLGITVSKPDVISSLEQGRKPLTMKRNEMIAKPSVSFLQVHSESQSPLHDI

SEQ ID NO: 278 - protein, 137 aa, Homo sapiens
  misc_feature: Incyte ID No: LI:794389.1.orf3:2000FEB01
  unsure 23: unknown or other
GLQKTFCRVMQFTLHRRIHTGEXPYECKECGKSFSAHSSLVTHKRTHSGEKPYKCKECGKAFSAHSSLVTHKRTHSGEKPYTCHACGKAFNTSSTLCQHNRIHTGEKPFQCSQCGKSFSCSSHLTRHCRMCNGKFSK

SEQ ID NO: 279 - protein, 97 aa, Homo sapiens
  misc_feature: Incyte ID No: LI:796010.1.orf3:2000FEB01
  unsure 4, 18, 23: unknown or other
LCIXKHTGEKPYECYACXNTFLXKSDLIKHQRIHTGEKPYECNECGKSFSEKSTLTKHLRTHRWEILCMYSMWKIFLLLLQFHRTSEKTHRGETFWM

SEQ ID NO: 280 - protein, 97 aa, Homo sapiens
  misc_feature: Incyte ID No: LI:796324.1.orf2:2000FEB01
  unsure 93: unknown or other
LCIRKHTGEKPYECYACGNTFLRKSDLIKHQRIHTGEKPYECNECGKSFSEKSTLTKHLRTHRWEILCMYSMWKIFLLLLQFHRTSEKTHRGXTFWM

SEQ ID NO: 281 - protein, 179 aa, Homo sapiens
  misc_feature: Incyte ID No: LI:796373.1.orf1:2000FEB01
MWESFSQKTCLISHQRFHTGKTPFVCTECGKSCSHKSGLINHQRIHTGEKPYTCSDCGKAFRDKSCLNRHRRTHTGERPYGCSDCGKAFSHLSCLVYHKGMLHAREKCVGSVKLENPCSESHSLSHTRDLIQDKDSVNMVTLQMPSVAAQTSLTNSAFQAESKVAIVSQPVARSSVSAD

SEQ ID NO: 282 - protein, 87 aa, Homo sapiens
  misc_feature: Incyte ID No: LI:796415.1.orf3:2000FEB01
KHEIIHFEEEPSEYNNNGNSFWLNEDLIWHQKIKNWEQPFEYNECGKAFPENSLFLVHKRAYTGQKTCKYTEHGKTCYMSFFITHQQ

SEQ ID NO: 283 - protein, 172 aa, Homo sapiens
  misc_feature: Incyte ID No: LI:798636.1.orf2:2000FEB01
NECGKALSSHSTLIIHERIHTGEKPCKCKVCGKAFRQSSALIQHQRMHTGERPYKCNECDKTFRCNSSLSNHQRIHTGEKPYRCLECGMSFGQSAALIQHQRIHTGEKPFKCNTCGKTFRQSSSLIAHQRIHTGEKPYECNACGKLFSQRSSLTNHYKIHIEEDSLKADLHV

SEQ ID NO: 284 - protein, 151 aa, Homo sapiens
  misc_feature: Incyte ID No: LI:800045.1.orf1:2000FEB01
  unsure 104: unknown or other
KIMHTGEKRYECDDCGGTFRSSSSLRVHKRIHTGEKPYKCEECGKAYMSYSSLINHKSTHSGEKNCKCDECGKSFNYSSVLDQHKRIHTGEKPYECGECGKAFXNSSGLRVHKRIHTGEKPYECDICGKTFSNSSGLTVHKRIHTVSDELP

SEQ ID NO: 285 - protein, 89 aa, Homo sapiens
  misc_feature: Incyte ID No: LI:800680.1.orf2:2000FEB01
LTYLRKKLRGRGKKEEEGMALSQGLFTFKDVAIEFSQEEWECLDPAQRALYRDVMLENYRNLLSLDEDNIPPEDGSHLAACGQSTLPLP

SEQ ID NO: 286 - protein, 146 aa, Homo sapiens
  misc_feature: Incyte ID No: LI:800894.1.orf2:2000FEB01
PAGIGRSTTKSPGPPGSLEMGSLTFRDVAIEFSLEEWQCLDTAQQNLYRNVMLENYRNLVFLGIAAFKPDLIIFLEEGKESWNMKRHEMVEESPVICSHFAQDLWPEQGIEDSFQKVILRRYKIHHHACELGPIMNHYPTCGQMHI

SEQ ID NO: 287 - protein, 78 aa, Homo sapiens
  misc_feature: Incyte ID No: LI:801015.1.orf1:2000FEB01
GSRKMDSVAFEDVAVNFTQEEWALLDPWQKKLYRDVMLETYRNLASVGDDDNIPSLREQVAHQRYFKTWHVEREYFSK

SEQ ID NO: 288 - protein, 126 aa, Homo sapiens
  misc_feature: Incyte ID No: LI:801236.1.orf3:2000FEB01
  unsure 4: unknown or other
MWEXFSHTPAFIQHQRIHTGEKPYECNACGKAFNRSAHLTEHQRTHTGEKPYVCKECGKTFSRSTHLTEHLKIHSCVKPYQCNECQKLFCYRTSLIRHQRTHTGEKPYQCNECGKSFSLSSALTKH

SEQ ID NO: 289 - protein, 96 aa, Homo sapiens; identical to SEQ ID NO: 265
  misc_feature: Incyte ID No: LI:803335.1.orf1:2000FEB01

SEQ ID NO: 290 - protein, 149 aa, Homo sapiens
  misc_feature: Incyte ID No: LI:803998.1.orf1:2000FEB01
KNSYWRKNPTNMKNVAKLLINSQRLLNIREFVQEGNPTNLKNVASLLAIPQSLLNIHVIHTGGNSYNCVECCNALNQSLRLTTYKTTHTGEKPCMCEECGKASNRSSILKRHKLIHTQERLYKPERCDNAFGNTSDFSEYKRNRTDEKS

SEQ ID NO: 291 - protein, 134 aa, Homo sapiens [sequence omitted]

SEQ ID NO: 292 - protein, 212 aa, Homo sapiens
  misc_feature: Incyte ID No: LI:808532.1.orf2:2000FEB01
HNFQLQKHHRIHTGEKPFKCEICGKSFCLRSSLNRHCMVHTAEKLYKSEKYGRGFIDRLDLHKHQMIHMGQKPYNCKECGKSFKWSSYLLVHQRVHTGEKPYKCEECGKGYISKSGLDFHHRTHTGERSYNCDNCGKSFRHASSILNHKKLHCQRKPLKCEDCGKRLVCRSYCKDQQRDHSGENPSKCEDCGKRYKRRLNLDIILSLFLNDI

SEQ ID NO: 293 - protein, 108 aa, Homo sapiens
  misc_feature: Incyte ID No: LI:443073.1.orf2:2000FEB01
KPYMCKECRKTFSQNAGLAQHQRIHTGEKPYECNVCGKAFSYSGSLTLHQRIHTGERPYECKDCRKSFRQRAHLAHHERIHTMESFLTLSSPSPSTSNQLPRPVGFIS

SEQ ID NO: 294 - protein, 83 aa, Homo sapiens
  misc_feature: Incyte ID No: LI:479671.1.orf1:2000FEB01
PACTGGFAGRMSGHPGSWEMNSVAFEDVAVNFTQEEWALLDPSQKNLYRDVMQETFRNLASIGNKGEDQSIEDQYKNSSRNLR

SEQ ID NO: 295 - protein, 180 aa, Homo sapiens
  misc_feature: Incyte ID No: LI:810078.1.orf1:2000FEB01
PYVCKECGKAFTQYSGLSMHVRSHSGDKPYECKECGKSFLTSSRLIQHIRTHTGEKPFVCVECGKAFAVSSNLSGHLRTHTEEKACECKICGKVFGYPSCLNNHMRTHSAQKPYTCKECGKAFNYSTHLKIHMRIHTGEKPYECKQCGKAFSHSSSFQIHERTHTGEKPYECKECGKAFT

SEQ ID NO: 296 - protein, 97 aa, Homo sapiens
  misc_feature: Incyte ID No: LI:810224.1.orf3:2000FEB01
LCISKHPGEKPYECYACGNTFLRKSDLIKHQRIHTGEKPYECNECGKSFSEKSTLTKHLRTHRWEILCMYSMWKIFLLLLQFHRTSEKPHRGETFWM

SEQ ID NO: 297 - protein, 217 aa, Homo sapiens
  misc_feature: Incyte ID No: LI:817052.2.orf1:2000FEB01
AAPESQQQRNRRGERPFTCMECGKSFRLKINLIIHQRNHIKEGPYECAECEISFRHKQQLTLHQRIHRVRGGCVSPERGPTFNPKHALKPRPKSPSSGSGGGGPKPYKCPECDSSFSHKSSLTKHQITHTGERPYTCPECKKSFRLHISLVIHQRVHAGKHEVSFICSLCGKSFSRPSHLLRHQRTHTGERPFKCPECEKSFSEKSKLTNHCRVHSR

SEQ ID NO: 298 - protein, 137 aa, Homo sapiens
  misc_feature: Incyte ID No: LG:892274.1.orf3:2000MAY19
DGGLDLGPTNSEGIPSPDLNPVLGMGSWRHIDSITPGTPGSAGLDLPARERITLVGGDKPIKVPTGIWGTSPAGYMGLILGKSRLNLQGMTVVPGAVDSDYEGETQVVLMSQDLWVFELGEYIAQLLLIPCKLHPSP

SEQ ID NO: 299 - protein, 169 aa, Homo sapiens
  misc_feature: Incyte ID No: LG:1080959.1.orf2:2000MAY19
PKQGINVWSPRHPENFLGIESRPPMLSLSPILLYTCEMFQDPVAFKDVAVNFTQEEWALLDISQKNLYREVMLETFWNLTSIGKKWKDQNIEYEYQNPRRNFRSVTEEKVNEIKEDSHCGETFTPVPDDRLNFQKKKASPEVKSCDSFVCEVGLGNSSSNMNIRGDTGH

SEQ ID NO: 300 - protein, 135 aa, Homo sapiens
  misc_feature: Incyte ID No: LG:1054900.1.orf3:2000MAY19
DAWARPPVLSLSPILLYTCEMFQDPVAFDDVAVNFTQEEWALLDISQRKLYKEVMLETFRNLTSVGKSWKDQNIEYEYQNPRRNFRSLIEKKVNEIKDDSHCGETFTQVPDDRLNFQEKKASPEIKSCDSFVCGK

SEQ ID NO: 301 - protein, 170 aa, Homo sapiens
  misc_feature: Incyte ID No: LG:1077357.1.orf1:2000MAY19
TVMLCDEEAQKRKAKESGMALPQGRLTFMDVAIEFSQEEWKSLDPGQRALYRDVMLENYRNLVFLGICLPDLSIISMLKQRREPLILQSQVKIVKNTDGRECVRSVNTGRSCVLGSNAENKPIKNQLGLTLESHLSELQLFQAGRKIYRSNPVEKFTNHRSSVSPLQKIS

SEQ ID NO: 302 - protein, 181 aa, Homo sapiens
  misc_feature: Incyte ID No: LG:1084051.1.orf3:2000MAY19
TSYIRTKTYECNICEKIFKQPIHLTEHMRIHTGEKPFRCKECGRAFSQSASLSTHQRIHTGEKPFECEECGKAFRHRSSLNQHHRTHTGEKPYVCDKCQKAFSQNISLVQHLRTHSGEKPFTCNECGKTFRQIRHLSEHIRIHTGEKPYACTACCKTFSHRAYLTHHQRSILGRDLQCKEC

SEQ ID NO: 303 - protein, 263 aa, Homo sapiens
  misc_feature: Incyte ID No: LG:1076853.1.orf1:2000MAY19
AFSRCSSLVQHERTHTGEKPFECSICGRAFGQSPSLYKHMRIHKRGKPYQSSNYSIDFKHSTSLTQDESTLTEVKSYHCNDCGEDFSHITDFTDHQRIHTAENPYDCEQAFSQQAISHPGEKPYQCNVCGKAFKRSTSFIEHHRIHTGEKPYECNECGEAFSRRSSLTQHERTHTGEKPYECIDCGKAFSQSSSLIQHERTHTGEKPYECNECGRAFRKKTNLHDHQRIHTGEKPYSCKECGKNFSRSSALTKHQRIHTRNKL

SEQ ID NO: 304 - protein, 340 aa, Homo sapiens
  misc_feature: Incyte ID No: LG:481631.10.orf3:2000MAY19
RLLVPEEETQKRKRKAKESGMALSQGLLTFRDVAIEFSQEEWKCLDPAQRTLYRDVMLENYRNLVSLDISSKCTMKEFLSTAQGNREVFHAGTLQIHESHHNGDFCYQDVDKDIHDYEFQWQEDERNGHEAPMTKIKKLTGITERYDQSHARNKPIKDQLGSSFHSHLPEMHIFQTEEKIDNQVVKSIHDASLVSTAQRISCRPKTHISNNHGNNFWNSSLLTQKQEVHMREKSFQCNESGKAFNYSSLLRKHQIIHLADKYKCDVCGKLFNQKRNLACHRRCHTGENPYKCNECGKTFSQTSSLTCHRRLHTGEKPYKCEECDKAFHFKSILERHRIIH

SEQ ID NO: 305 - protein, 89 aa, Homo sapiens; identical to SEQ ID NO: 285
  misc_feature: Incyte ID No: LG:1088431.2.orf1:2000MAY19

SEQ ID NO: 306 - protein, 80 aa, Homo sapiens
  misc_feature: Incyte ID No: LI:401619.10.orf1:2000MAY01
ALHPLPKRQALEKSNGTSAVFNPSVLHYQQALTSAQLQQHAAFIPTGMCPYCPTSCALLVMCFLLISLSCLVASSLLLKV

SEQ ID NO: 307 - protein, 386 aa, Homo sapiens
  misc_feature: Incyte ID No: LI:1144007.1.orf2:2000MAY01
ALDGVRPPQSQEMATAVEPEDQDLWEEEGILMVKLEDDFTCRPESVLQRDDPVLETSHQNFRRFRYQEAASPREALIRLRELCHQWLRPERRTKEQILELLVLEQFLTVLPGELQSWVRGQRPESGEEAVTLVEGLQKQPRRPRRWVTVHVHGQEVLSEETVHLGAEPESPNELQDPVQSSTPEQSPEETTQSPDLGAPAEQRPHQEEELQTLQESEVPVPEDPDLPAERSSGDSEMVALLTALSQGLVTFKDVAVCFSQDQWSDLDPTQKEFYGEYVLEERLWNCCLSVHSQSPRPDEILPGLDEEEPGVPDIQEPQETQEPEILSFTYTGDRSKDEEECLEQEDLSLEDIHRPVLGEPEIHQTPDWEIVFEDNPGRLNERRFGY

SEQ ID NO: 308 - protein, 368 aa, Homo sapiens
  misc_feature: Incyte ID No: LI:331074.1.orf2:2000MAY01
MCSRKKAEFIKGSHKCNVCSRTFFSENGLREHLQTHRGPAKHYMCPICGERFPSLLTLTEHKVTHSKSLDTGTCRICKMPLQSEEEFIEHCQMHPDLRNSLTGFRCVVCMQTVTSTLELKIHGTFHMQKLAGSSAASSPNGQGLQKLYKCALCLKEFRSKQDLVKLDVNGLPYGLCAGCMARRANGQVGGLAPPEPADRPCAGLRCPECSVKFESAEDLESHMQVDHRDLTPETSGPRKGTQTSPVPRKKTYQCIKCQMTFENEREIQIHDANHMIEEGINHECKLCNQMFDSPAKLLCHLIEHSFEGMGGTFKCPVCFTVFVQANKLQQHIFAVHGQEDKIYDCSQCPQKFFFQTELQNHTMSQHAQ

SEQ ID NO: 309 - protein, 175 aa, Homo sapiens
  misc_feature: Incyte ID No: LI:1170349.1.orf2:2000MAY01
VTFQDVAIDFSKEEWGFLNPAQRDLYTTVMLENYQNLVWLGLSISKSVISLLEKRKLPWIMAKEEIRGPLPDVPGAEIKELSAKRAINEVLSQFDTVIKCTRNVCKECGNLYCHNMQLTLHKRNHTQKKCNQCLDCGKYFTRQSPLIQHQRIHTGERPYKCNECIKTFNQRAHLT

SEQ ID NO: 310 - protein, 78 aa, Homo sapiens
  misc_feature: Incyte ID No: LG:335097.1.orf2:2000FEB18
TQEVEVAVSLDCCHCTPAWVTAELCLKKKMWNSFLQMFSNSIPSSVCRYMYAIILQVIHVDCIGNYRKDYIGLFRKYF

SEQ ID NO: 311 - protein, 61 aa, Homo sapiens [sequence omitted]

SEQ ID NO: 312 - protein, 73 aa, Homo sapiens
  misc_feature: Incyte ID No: LI:805478.1.orf1:2000FEB01
GLFQCIHQVTEVGQKVATVLLFYGYYKCTGTLKITCLYNVILYKVCSPGSDQPDVCYDPSELPMTTVFKIRLR

SEQ ID NO: 313 - protein, 184 aa, Homo sapiens
  misc_feature: Incyte ID No: LG:101269.1.orf1:2000MAY19
CCSFKFHFDLSWEILWPIIPWMLKMVLTENPNQEIATSLEFLLLQNSPGSLRAQQRMSYYGSSYHIINADAKYPGYPPEHIIAEKRRARRRLLHKDGSCNVYFKHIFGEWGSYVVDIFTTLVDTKWRHMFVIFSLSYILSWLIFGSVFWLIAFHHGDLLNDPDITPCVDNVHSFTGAFLFSLET

SEQ ID NO: 314 - protein, 219 aa, Homo sapiens [sequence omitted]

SEQ ID NO: 315 - protein, 1603 aa, Homo sapiens
  misc_feature: Incyte ID No: LI:410188.1.orf1:2000MAY01
AAEPAPSAPSPAPSRVRAKQQPPTPGPGRGTSSFPTGNVRRACAQKQDEKMANFLLPRGTSSFRRFTRESLAAIEKRMAEKQARGSTTLQESREGLPEEEAPRPQLDLQASKKLPDLYGNPPQELIGEPLEDLDPFYSTQKTFIVLNKGKTIFRFSATNALYVLSPFHPVRRAAVKILVHSLFNMLIMCTILTNCVFMAQHDPPPWTKYVEYTFTAIYTFESLVKILARAFCLHAFTFLRDPWNWLDFSVIIMAYTTEFVDLGNVSALRTFRVLRALKTISVISGLKTIVGALIQSVKKLADVMVLTVFCLSVFALIGLQLFMGNLRHKCVRNFTALNGTNGSVEADGLVWESLDLYLSDPENYLLKNGTSDVLLCGNSSDAGTCPEGYRCLKAGENPDHGYTSFDSFAWAFLALFRLMTQDCWERLYQQTLRSAGKIYMIFFMLVIFLGSFYLVNLILAVVAMAYEEQNQATIAETEEKEKRFQEAMEMLKKEHEALTIRGVDTVSRSSLEMSPLAPVNSHERRSKRRKRMSSGTEECGEDRLPKSDSEDGPRAMNHLSLTRGLSRTSMKPRSSRGSIFTFRRRDLGSEADFADDENSTARESESHHTSLLVPWPLRRTSAQGQPSPGTSAPGHALHGKKNSTVDCNGVVSLLGAGDPEATSPGSHLLRPVMLEHPPDTTTPSEEPGGPQMLTSQAPCVDGFEEPGARQRALSAVSVLTSALEELEESRHKCPPCWNRLAQRYLIWECCPLWMSIKQGVKLVVMDPFTDLTITMCIVLNTLFMALEHYNMTSEFEEMLQVGNLVFTGIFTAEMTFKIIALDPYYYFQQGWNIFDSIIVILSLMELGLSRMSNLSVLRSFRLLRVFKLAKSWPTLNTLIKIIGNSVGALGNLTLVLAIIVFIFALVGKQLLGENYRNNRKNISAPHEDWPRWHMHDFFHSFLIVFRILCGEWIENMWACMEVGQKSICLILFLTVMVLGNLVVLNLFIALLLNSFSADNLTAPEDDGEVNNLQVALARIQRGLRFVKRTTWDFCCGLLRHRPQKPAALAAQGQLPSCIATPYSPPPPETEKVPPTRKETQFEEGEQPGQGTPGDPEPVCVPIAVAESDTDDQEEDEENSLGTEEESSKQQESQPVSGWPRGPPDSRTWSQVSATASSEAEASASQADWRQQWKAEPQAPGCGETPEDSCSEGSTADMTNTAELLEQIPDLGQDVKDPEDCFTEGCVRRCPCCAVDTTQAPGKVWWRLRKTCYHIVEHSWFETFIIFMILLSSGALAFEDIYLEERKTIKVLLEYADKMFTYVFVLEMLLKWVAYGFKKYFTNAWCWLDFLIVDVSLVSLVANTLGFAEMGPIKSLRTLRALRPLRALSRFEGMRVVVNALVGAIPSIMNVLLVCLIFWLIFSIMGVNLFAGKFGRCINYTDGEFSLVPLSIVNNKSDCKIQNSTGSFFWVNVKVNFDNVAMGYLALLQVATFKGWMDIMYAAVDSREVNMQPKWEDNVYMYLYFVIFIIFGGFFTLNLFVGVIIDNFNQQKKKLGGQDIFMTEEQKKYYNAMKKLGSKKPQKPIPRPLNKFQGFVFDIVTRQAFDITIMVLICLNMVHHDGGD

SEQ ID NO: 316 - protein, 200 aa, Homo sapiens
  misc_feature: Incyte ID No: LI:1188288.1.orf3:2000MAY01
GGAGVRGAGWRLQQRGRGARAPPARQARQGGPRARPLEQQGGVRAERGRGDHWAWATCGASPTLCYKNGGGAFLIPYVVFFICCGIPVFFLETALGQFTSEGGITCWRKVCPLFEGIGYATQVIEAHLNVYYIIILAWAIFYLSNCFTTELPWATCGHEWNTENCVEFQKLNVSNYSHVSLQKCHLPCHGVLGAPGPGHL

SEQ ID NO: 317 - protein, 329 aa, Homo sapiens
  misc_feature: Incyte ID No: LI:427997.4.orf3:2000MAY01
RTGGGGGSQSPAPDGERTMHCLGAEYLVSADGAPRQREWRPQIYRKCTDTAWLFLFFLFWTGLVFIMGYSVVAGAAGRLLFGYDSFGNMCGKKNSPVEGAPLSGQDMTLKKHVFFMNSCNLEVKGTQLNRMALCVSNCPEEQLDSLEEVQFFANTSGSFLCGYSLNSFNYTHSPKADSLCPRLPVPPSKSFPLFNRCVPQTPECYSLFASVLINDVDTLHRILSGIMSGRDTILGLCILALALSLAMMLTVQIHTPPFWFTFSFHWLFWDCCLVCGVLWWLYYDYTNDLSIELDTEQGKYEVRAGVCYRNPQGITADAARLDILFSERE

SEQ ID NO: 318 - protein, 256 aa, Homo sapiens
  misc_feature: Incyte ID No: LG:451682.1.orf3:2000FEB18
HLAAAAMSRRYDSRTTIFSPEGRLYQVEYAMEAIGNAGSALGILAADGVVLVGEKKVTSKLLQTSRSAEKMYKIDSHLACAVAGIMSDANILINTARLHAQRYALSYQEPIPVEQLVQSLCDTKQGYTQFGGLRPFGVSFLFAGWDKHHGFQLYMSDPSGNYGGWKAAAVGANSQAAQSMLKQDYKDALTREEAVGLALKVLSKTMDSTSLTAEKLELAEVFLQPDTGEVQYQVCSPEALGKLLANSGLTQPTPEA

SEQ ID NO: 319 - protein, 76 aa, Homo sapiens
  misc_feature: Incyte ID No: LG:1077283.1.orf2:2000FEB18
AVSFRRLLQTWSTPPCSSTSRLMASLWVAVWLRKWLADKVPKTAENFRALSTGEKGFGYNGFLLSQNYSRIHVPGW

SEQ ID NO: 320 - protein, 276 aa, Homo sapiens
  misc_feature: Incyte ID No: LG:481436.5.orf3:2000FEB18
TNIKITMKVLGVTKDSGDEDLKKAYRKLALKFHPDKNHAPGATDAFKKIGNAYAVLSNPEKRKQYDLTGNEEQACNHQNNGRFNFHRGCEADITPEDLFNIFFGGGFPSGSVHSFSNGRAGYSQQHQHRHSGHEREEERGDGGFSVFIQLMPIIVLILVSLLSQLMVSNPPYSLYPRSGTGQTIKMQTENLGVVYYVNKDFKNEYKGMLLQKVEKSVEEDYVTNIRNNCWKERQQKTDMQYAAKVYRDDRLRRKADALSMDNCKELERLTSLYKGG

SEQ ID NO: 321 - protein, 115 aa, Homo sapiens
  misc_feature: Incyte ID No: LI:793701.1.orf1:2000FEB01
QALLQSHPEADWSTHSRSMRKLIVRFIFLKFWTYTVRASTDLTQTGDCSQCIHQVTEVGQQIKTIFLFYSYYECVETIKKLVCIMPLSTRYVAREMTDLMRVITHLSPPQPPFLK

SEQ ID NO: 322 - protein, 227 aa, Homo sapiens
  misc_feature: Incyte ID No: LI:373637.1.orf3:2000FEB01
HPAWWTTTRCWTCPGRPHPRPSRRRTASWRSSGTPTKTLRTRRKRRGDSSRWPRPTRCCRTPRNAISMTAMARRGRRAAAQAAGPSRTPSSTSSASATQPTSSGSSSAARTHSPLTSWETRWRIFWGGQRNCWGSRSRASAPLFSAFSEFPAFGGVFSSFDTGFRSFGSLGSGGLSSFCMSYGSDGTGSFKSMSTSTEIVDGKKITTKRIIENGQERVEVEEDGELS

SEQ ID NO: 323 - protein, 100 aa, Homo sapiens
  misc_feature: Incyte ID No: LG:239368.2.orf3:2000MAY19
EESVLRGKFLFTSGIPRASWVDSGLHTQPGSPGSASVPPLSGPGCGLGARPSLAPGNSDVFLHLLPLLRGPKPGKPADASHPENCEQTHRASPTPESSCC

SEQ ID NO: 324 - protein, 142 aa, Homo sapiens
  misc_feature: Incyte ID No: LI:053826.1.orf3:2000MAY01
DFWAKIYLYALEGRKYRSILQLVKPWYDEVKDYAFPYPQDCNPRCPMRCFGPMCTHYTQMVWATSNRIGCAIHTCQNMNVWGSVWRRAVYLVCNYAPKGNWIGEAPYKVGVPCSSCPPSYGGSCTDNLCFPGVTSNYLYWFK

SEQ ID NO: 325 - protein, 263 aa, Homo sapiens
  misc_feature: Incyte ID No: LI:449393.1.orf3:2000MAY01
AMSLRVLNPNAEVLNKSAALHMNINAAKGLQDVLKTNLGPKGTIKMLVGGAGDLKLTKDGNTLLKEMQIQNPTAIMIARTAVAQDDTSGDGTTSTVLFIGELMKQSERCIDEGTHPRFLVDGFDVAKRACLDFLDKFKTPVVTGEEPDRDTLKMVARTTLRTKLYEGLADQLTDIVVNAVLCIRKPDEPIDLFMVEIMHMRHKFDVDTRLVEGLVLDHGSRHPDMKRRAENCYILTCNVSLEYEKSEINAGFFYSNAEQKKKK

SEQ ID NO: 326 - protein, 357 aa, Homo sapiens
  misc_feature: Incyte ID No: LI:1071427.96.orf2:2000MAY01
DETREDAMAMVDHCLKKALWFQGRCVKVDLSEKYKKLVLRIPNRGIDLLKKDKSRKRSYSPDGKESPSDKKSKTDGSQKTESSTEGKEQEEKSGEDGEKDTKDDQTEQEPNMLLESEDELLVDEEEAAALLESGSSVGDETDLANLGDVASDGKKEPSDKAVKKDGSASAAAKKKLKKRRFPGSMEGFVTLDEVGDEEDSELQKLRKSGMAFKSGDKNDDGLVEIKVDKIEELDQENEAALENGIKNEENTEPGAESSENADDPNKDTSENADGQSDENKDDYTIPDEYRIGPYQPNVPVGIDYVIPKTGFYCKLCSLFYTNEEVAKNTHCSSLPHYQKLKKFLNKLAEERRQKKET

SEQ ID NO: 327 - protein, 100 aa, Homo sapiens
  misc_feature: Incyte ID No: LI:336338.8.orf2:2000MAY01
  unsure 10, 18, 30: unknown or other
MISSNSPNLXLWPITTFXHVCTSCCSRLQXPFSLADFWKSNGRVLGGRRLLYACEKEQSVPTEGSSTTLLQNMYISRLSSHLRFLCSCRLIDYSILLKRK

SEQ ID NO: 328 - protein, 303 aa, Homo sapiens
  misc_feature: Incyte ID No: LG:345527.1.orf2:2000FEB18
RELKRFNADNKLLLTGTPLQNNLSELWSLLNFLLPDVFDDLKSFESWFDITSLSETAEDIIAKEREQNVLHMLHQILTPFLLRRLKSDVALEVPPKREVVVYAPLSKKQEIFYTAIVNRTIANMFGSSEKETIELSPTGRPKRRTRKSINYSKIDDFPNELEKLISQIQPEVDRERAVVEVNIPVESEVNLKLQNIMMLLRKCCNHPYLIEYPIDPVTQEFKIDEELVTNSGKFLILDRMLPELKKRGHKVLLFSQMTSMLDILMDYCHLRDFNFSRLMGPCLTQREKKTCTASTRIQRCLSS

SEQ ID NO: 329 - protein, 72 aa, Homo sapiens
  misc_feature: Incyte ID No: LG:1089383.1.orf2:2000FEB18
TALLLTQSLFGSLFTWTRVTFGAEDPGQEDSFRRRVPCPCPHSVRRSTYDLRSSDQPAQGTSHEFQIGFPTI

SEQ ID NO: 330 - protein, 76 aa, Homo sapiens
  misc_feature: Incyte ID No: LG:1092522.1.orf2:2000FEB18
FSYLSSKWVVKQQRQLAISTMHLAQELLMNVQCSGGSRHFSKEMRTLKMRSIVAKPLEVDNDQLRAISKADPLKAT

SEQ ID NO: 331 - protein, 74 aa, Homo sapiens
  misc_feature: Incyte ID No: LG:1093216.1.orf2:2000FEB18
  unsure 2, 17, 36: unknown or other
GXPPTTSGPQTNQPKEXLMNFKSDSQLYEDTLAGRXVLIKNLTPQTLQPRWTGPYLVIYSTPTAVRLQDPPHWV

SEQ ID NO: 332 - protein, 67 aa, Homo sapiens
  misc_feature: Incyte ID No: LI:270318.3.orf3:2000FEB01
LSFKRDSWEYGHPAPRCGNESSRSGEAALADVQLAAPVSNQLHPDGVEDRGVGGLLRSYTTQLTMNI

SEQ ID NO: 333 - protein, 192 aa, Homo sapiens
  misc_feature: Incyte ID No: LI:335671.2.orf2:2000FEB01
WVHVLLRERKKHAQLQHGSRGVYLLVSTRAGGLGINLTAADTVIIYDSDWNPQSDLQAQDRCHRIGQTKPVVVYRLVTANTIDQKIVERAAAKRKLEKLIIHKNHFKGGQSGLNLSKNFLDPKELMELLKSRDYEREIKGSREKVISDKDLELLLDRSDLIDQMNASGPIKEKMGIFKILENSEDSSPECLF

SEQ ID NO: 334 - protein, 74 aa, Homo sapiens
  misc_feature: Incyte ID No: LI:793758.1.orf2:2000FEB01
  unsure 36: unknown or other
GDPPTTSGPQTNQPKEHLMNFKSDSQLYEDTLAGRXVLIKNLTPQTLQPRWTGPYLVIYSTPTAVRLQDPPHWV

SEQ ID NO: 335 - protein, 72 aa, Homo sapiens
  misc_feature: Incyte ID No: LI:803718.1.orf2:2000FEB01
  unsure 41: unknown or other
TALLLTQSLFGSLFTWTRVTFGAEDPGQEDSFRRRVPCPCXHSVRRSTYDLRSSDQPAQGTSHEFQIGFPTI

SEQ ID NO: 336 - protein, 55 aa, Homo sapiens
  misc_feature: Incyte ID No: LI:412179.1.orf2:2000FEB01
TIEMMLDIKQIQVIFLFEFKMGRKIAETTRNIDNAFGPGLLTNVQCSGSSRRQGA

SEQ ID NO: 337 - protein, 107 aa, Homo sapiens
  misc_feature: Incyte ID No: LI:815679.1.orf3:2000FEB01
LRYINGSMSSLYPRLCHLSLQFLPLKNRSIFLQSLMLGFELCLALATGILICMTKNLESVNSFVLAHSCYHHENKPRPGCCFQQKIRDTKNKVELPRHAHARLTNPQ

SEQ ID NO: 338 - protein, 147 aa, Homo sapiens
  misc_feature: Incyte ID No: LI:481361.3.orf3:2000FEB01
CPLQEMKPQRNTADLLPKLKSMALADRAVFEKGMKAFVSYVQAYAKHECNLIFRLKDLDFASLARGFALLRMPKMPELRGKQFPDFVPVDVNTDTIPFKDKIREKQRQKLLEQQRREKTENEGRRKFIKNKAWSKQKAKKEKKKKMN

SEQ ID NO: 339 - protein, 257 aa, Homo sapiens
  misc_feature: Incyte ID No: LG:247388.1.orf1:2000MAY19
QNSVKLAILYLMTFHLQAMVRSAGKLVLIDKLLPKLKAGGHKVLIFSQMVRCLDILEDYLIQRRYLYERIDGRVRGNLRQAAIDRFSKPDSDRFVFLLCTRAGGLGINLTAADTCIIFDSDWNPQNDLQAQARCHRIGQSKAVKVYRLITRNSYEREMFDKASLKLGLDKAVLQSMSGRDGNITGIQQFSKKEIEDLLRKGAYAAIMEEDDEGSKFCEEDIDQILLRRTTTITIESEGKGSTFAKASFVASENRTDI

SEQ ID NO: 340 - protein, 63 aa, Homo sapiens
  misc_feature: Incyte ID No: LG:255789.10.orf3:2000MAY19
LKELTILFSHFPIQMKTASFLVPLLPSKTILFDRARGQVFLMLLRKPSITAHDLLVKGAGKYK

SEQ ID NO: 341 - protein, 112 aa, Homo sapiens [sequence omitted]

SEQ ID NO: 342 - protein, 427 aa, Homo sapiens
  misc_feature: Incyte ID No: LI:331610.2.orf3:2000MAY01
TRTTTRLGSPKGSTCFRCTRTTSRESTWALCSPRIPTWAKNGTVSYSILPSHIGDVSIYTYVSVNPTNGAIYALRSFNFEQTKAFEFKVLAKDSGAPAHLESNATVRVTVLDVNDNAPVIVLPTLQNDTAELQVPRNAGLGYLVSHCARPRQRLRRRAGVSPTKIVDGNDDHLFEIDPSSGEIRTLHPFWEDVTPVVELVVKVTDHGKPTLSAVAKLIIRSVSGSLPEGVPRVNGEQHHWDMSLPLIVTLSTISIILLAAMITIAVKCKRENKEIRTYNCRIAEYSHPQLGGGKGKKKKINKNDIMLVQSEVEERNAMNVMNVVSSPSLATSPMYFDYQTRLPLSSPRSEVMYLKPASNNLTVPQGHAGCHTSFTGQGTNASETPATRMSIIQTDNFPAEPNYMGSRQQFVQSISVAPRLRTQKEPA

SEQ ID NO: 343 - protein, 144 aa, Homo sapiens
  misc_feature: Incyte ID No: LG:982697.1.orf2:2000FEB18
  unsure 52, 56: unknown or other
GSIEGKCGVGGSNRVTAGALPNGTIRSGPLPSRPKDDRSTSSLYSAPGKATXTQLXPMSAALDSLPCKAIGAGLLKAWGAHPLYQCGLDVEHDVEDYFGTLRFSDFPTGFWSCVDPVDPFFWPISPFLGWKHLPNPYTPIVSWK

SEQ ID NO: 344 - protein, 97 aa, Homo sapiens [sequence omitted]

SEQ ID NO: 345 - protein, 75 aa, Homo sapiens
  misc_feature: Incyte ID No: LI:811341.1.orf3:2000FEB01
GLFQCIHQVTEVGQKVATVLLFYGYYKCTGTLKITCLYNVILYKVCSPGSDQPDVCYDPSEPPMTTVFKIRLRTE

SEQ ID NO: 346 - protein, 135 aa, Homo sapiens
  misc_feature: Incyte ID No: LI:903225.1.orf3:2000FEB01
DPFQKMAPKVKKEAPGPPKAEAKAKALKAKKVVLKGVHGHKKKKIRMSPTFQRPKTLRLWRPPRYPRKTTPRRNKLDHYAIIKFPLTTEFAMKKIKDNNTLVFTVDVKANKHQIKQAVKKLCDIDGAKVNTLMER

SEQ ID NO: 347 - protein, 55 aa, Homo sapiens
  misc_feature: Incyte ID No: LI:242079.2.orf2:2000FEB01
SARIEAWEPPTRFQSMCGKAWMSRQKPAAGTEPSWRTSTRVVWRGNLGLEFPHSF

SEQ ID NO: 348 - protein, 129 aa, Homo sapiens [sequence omitted]

SEQ ID NO: 349 - protein, 291 aa, Homo sapiens
  misc_feature: Incyte ID No: LI:1169865.1.orf2:2000MAY01
RPTVSVSCASSRPQFLITVPVLTVINYRPHNMRPEDRMFHIRAVILRALSLAFLLSLRGAGAIKADHVSTYAAFVQTHRPTGEFMFEFDEDEMFYVDLDKKETVWHLEEFGQAFSFEAQGGLANIAILNNNLNTLIQRSNHTQATNDPPEVTVFPKEPVELGQPNTLICHIDKFFPPVLNVTWLCNGELVTEGVAESLFLPRTDYSFHKFHYLTFVPSAEDFYDCRVEHWGLDQPLLKHWEAQEPIQMPETTETVLCALGLVLGLVGIIVGSVLIIKSLRSGHDPRAQGTL

SEQ ID NO: 350 - protein, 517 aa, Homo sapiens
  misc_feature: Incyte ID No: LG:337818.2.orf1:2000FEB18
RGAWERRRSRPAEMEATGTWALLLALALLLLLTLALSGTRARGHLPPGPTPLPLLGNLLQLRPGALYSGLMRLSKKYGPVFTIYLGPWRPVVVLVGQEAVREALGGQAEEFSGRGTVAMLEGTFDGHGVFFSNGERWRQLRKFTMLALRDLGMGKREGEELIQAEARCLVETFQGTEGRPFDPSLLLAQATSNVVCSLLFGLRFSYEDKEFQAVVRAAGGTLLGVSSQGGQTYEMFSWFLRPLPGPHKQLLHHVSTLAAFTVRQVQQHQGNLDASGPARDLVDAFLLKMAQEEQNPGTEFTNKNMLMTVIYLLFAGTMTVSTTVGYTLLLLMKYPHVQKWVREELNRELGAGQAPSLGDRTRLPYTDAVLHEAQRLLALVPMGIPRTLMRTTRFRGYTLPQGTEVFPLLGSILHDPNIFKHPEEFNPDRFLDADGRFRKHEAFLPFSLGKRVCLGEGLAKAECFLFFTTILQAFSLESPCPPDTLSLKPTVSGLFNIPPAFQLQVRPTDLHSTTQTR

SEQ ID NO: 351 - protein, 232 aa, Homo sapiens
  misc_feature: Incyte ID No: LI:337818.1.orf1:2000FEB01
LSTDINIVHLQSQAHSQVTHQLPWICSPHVGVWLSPSQATETATHVHSSHALSIHRTSQCPCPWCLAQGTACPLRGHATQRLSLSMAPTHAPSLGYTTLPACDHRCPHTPNHLSTQLPTYDIVLAPQSIFPLRHAAPTEAQSPATSATAALSHPFLSTLILPNANTSGSAIMHRDFGHTRTLRPEEHLPNPNTCLCNHVESGPCCPSTHTYTLTDLQPLFGVRVPTRPSGRG

SEQ ID NO: 352 - protein, 220 aa, Homo sapiens
  misc_feature: Incyte ID No: LG:241577.4.orf1:2000MAY19
GKVEVEDEGCTAQKAPVRPGLLPPCLTPEIGAGVPSAGCPLCPSMPPWACSYHTSHVPMIPLLGPRSSFSRKWSARARGGGKMSPYTNCYAQRYYPMPEEPFCTELNAEEQALKEKEKGSWTQLTHAEKVALYRLQFNETFAEMNRRSNEWKTVMGCVFFFIGFAALVIWWQRVYVFPPKPITLTDERKAQQLQRMLDMKVNPVQGLASRWDYEKKQWKK

SEQ ID NO: 353 - protein, 95 aa, Homo sapiens
  misc_feature: Incyte ID No: LG:344786.4.orf1:2000MAY19
PILWSVLSFSIELCFCCFILSLLCVFCPILCSRHQEPRHPPPVTYSSEPARSLFRMITWRSLRKLLKNTLVPSLSGLGPFRHFSVSMTQTMQRHF

SEQ ID NO: 354 - protein, 331 aa, Homo sapiens
  misc_feature: Incyte ID No: LI:414307.1.orf2:2000FEB01
  unsure 191: unknown or other
GMGKLCLGPTLCPAAAAEESRDAEPRRELLCSGRPWTWRAAARVTTMIPWVLLACALPCAADPLLGAFARRDFRKGSPQLVCSLPGPQGPPGPPGAPGPSGMMGRMGFPGKDGQDGHDGDRGDSGEEGPPGRTGNRGKPGPKGKAGAIGRAGPRGPKGVNGTPGKHGTPGKKGPKGKKGEPGLPGPCSCGXGHTKSAFSVAVTKSYPRERLPIKFDKILMNEGGHYNASSGKFVCGVPGIYYFTYDITLANKHLAIGLVHNGQYRIRTFDANTGNHDVASGSTILALKQGDEVWLQIFYSEQNGLFYDPYWTDSLFTGFLIYADQDDPNEV

SEQ ID NO: 355 - protein, 93 aa, Homo sapiens [sequence omitted]

SEQ ID NO: 356 - protein, 112 aa, Homo sapiens
  misc_feature: Incyte ID No: LI:246194.2.orf1:2000FEB01
  unsure 25, 28, 52, 112: unknown or other
SSTHHRRSTGAPTPGLPPPPPATRXSCXAASAAPGPGAAPVGAPTPASTTCXVLARTTSPSGSTARSDAAERGSPGPGPPAGPAAQRHGGRHPHGSHLNPQHPIKFLFNTKX

SEQ ID NO: 357 - protein, 73 aa, Homo sapiens
  misc_feature: Incyte ID No: LI:815961.1.orf3:2000FEB01
CVEEVCECKDVEVLPVLNELADGLVPLVVTVIGGAVWVDPVTLSVVSGGMVPVGVEWMEAEVDICAWVGVMTL

SEQ ID NO: 358 - protein, 239 aa, Homo sapiens
  misc_feature: Incyte ID No: LG:120744.1.orf1:2000MAY19
  unsure 199: unknown or other
NENRNMAHYITFLCMVLVLLLQNSVLAEDGEVRSSCRTAPTDLVFILDGSYSVGPENFEIVKKWLVNITKNFDIGPKFIQVGVVQYSDYPVLEIPLGSYDSGEHLTAAVESILYLGGNTKTGKAIQFALDYLFAKSSRFLTKIAVVLTDGKSQDDVKDAAQAARDSKITLFAIGVGSETEDAELRAIANKPSSTYVFYXEDYIAISKIREVMKQKLCEESVCPTRIPVAARDERGFDIL

SEQ ID NO: 359 - protein, 528 aa, Homo sapiens
  misc_feature: Incyte ID No: LI:757520.1.orf1:2000MAY01
ASHSAARTTFRCLSDSAQPHTMSCRSYRISSGCGVTRNFSSCSAVAPKTGNRCCISAAPYRGVSCYRGLTGFGSRSLCNLGSCGPRIAVGGFRAGSCGRSFGYRSGGVCGPSPPCITTVSVNESLLTPLNLEIDPNAQCVKQEEKEQIKSLNSRFAAFIDKVRFLEQQNKLLETKWQFYQNQRCCESNLEPLFSGYIETLRREAECVEADSGRLASELNHVQEVLEGYKKKYEEEVALRATAENEFVVLKKDVDCAYLRKSDLEANVEALVEESSFLRRLYEEEIRVLQAHISDTSVIVKMDNSRDLNMDCIIAEIKAQYDDVASRSRAEAESWYRSKCEEMKATVIRHGETLRRTKEEINELNRMIQRLTAEIENAKCQRAKLEAAVAEAEQQGEAALSDARCKLAELEGALQKAKQDMACLLKEYQEVMNSKLGLDIEIATYRRLLEGEEHRLCEGVGSVNVCVSSSRGGVSCGGLSYSTTPGRQITSGPSAIGGSITVVAPDSCAPCQPRSSSFSCGSSRSVRFA

SEQ ID NO: 360 - protein, 157 aa, Homo sapiens
  misc_feature: Incyte ID No: LG:160570.1.orf2:2000FEB18
  unsure 150: unknown or other
VEGAAGRLGGSFLSWLETTTTDMGCFCAVPEEFYCEVLLLDESKLTLTTQQQGIKKSTKGSVVLDHVFHHVNLVEIDYFGLRYCDRSHQTYWLDPAKTLAEHKELINTGPPYTLYFGIKFYAEDPCKLKEEITRYSIDFVFEQIHALRIXKALFKTN

SEQ ID NO: 361 - protein, 65 aa, Homo sapiens
  misc_feature: Incyte ID No: LI:350398.3.orf3:2000FEB01
  unsure 22-23, 56, 65: unknown or other
GLPKPGALVGDRAAPAWVQPPXXQVNRFHKIRNRALLLTDQHLYKLDPDRQYRVMXAVPLEAVTX

SEQ ID NO: 362 - protein, 517 aa, Homo sapiens
  misc_feature: Incyte ID No: LI:221285.1.orf3:2000FEB01
LAARGVLSRGQPGSAAAPRQEKQPRTPWKSRSTWACENGANTSPAKPHSKAGPRTATVAPQASRMTVKPAKAASLARNLAKRRRTYLGGAAGRSQEPEVPCAAVLPGKPGDRNCPEFPPPDRTLGCWATDAAPAAGLCGAGSEPSIAPTSCAGNLPSRPPPLLSPLLASRNPCPWHYLHLSGSHNTLAPTCFKAKLHRKRGSQPPDMASALTDRTSRAPSTYTYTSRPRALPCQRSRYRDSLTQPDEEPMHYGNIMYDRRVIRGNTYALQTGPLLGRPDSLELQRQREARKRALARKQAQEQLRPQTPEPVEGRKHVDVQTELYLEEIADRIIEVDMECQTDAFLDRPPTPLFIPAKTGKDVATQILEGELFDFDLEVKPVLEVLVGKTIEQSLLEVMEEEELANLRASQREYEELRNSERAEVQRLEEQERRHREEKERRKKQQWEIMHKHNETSQKIAARAFAQRYLADLLPSVFGSLRDSGYFYDPIERDIEIGFLPWLMNEVEKTMEYSMVGR

SEQ ID NO: 363 - protein, 60 aa, Homo sapiens
  misc_feature: Incyte ID No: LI:401605.2.orf2:2000FEB01
AERGLRTLLSLEDERMCHSGQMGSLLGTVCSESVPSTPKKPPKSWASLWNQQILHFGAYK

SEQ ID NO: 364 - protein, 239 aa, Homo sapiens
  misc_feature: Incyte ID No: LI:329017.1.orf1:2000FEB01
IYTEVEQLGWKLYGDKLATSSGDTTVKLWDLCTGDCILTFEGHSRAVWSCTWHSCGNFVASSSLDKTSKIWDVNSERCRCTLYGHTDSVNSIEFFPFSNTLLTSSADKTLSIWDARTGICEQSLYGHMHSINDAIFDPRGHMIASCDACGVTKLWDFRKLLPIVSIDIGPSPGNEVNFDSSGRVLAQASGNGVIHLLDLKSGEIHKLMGHENEAHTVVFSHDGEILFSGGSDGTVRTWS

SEQ ID NO: 365 - protein, 160 aa, Homo sapiens
  misc_feature: Incyte ID No: LI:401322.1.orf1:2000FEB01
ATQWESPPGDTTGGSPGIYKVPPATARWDSWCCWRPVWCLQSATLQLQLLDQPCVSASPSMWARPECRWAMPAGSCTAWSTTSSPVAPCPATRPWGAVITPSTPSSGRPSLAGMCPGLSVDLEPAVIGWHQLPVPHSGARGCCSQGAAGSLRAKQYHSHH

SEQ ID NO: 366 - protein, 757 aa, Homo sapiens
  misc_feature: Incyte ID No: LG:403409.1.orf3:2000MAY19
GRGRRKPNEFLGGCRMGDSKVKVAVRIRPMNRRETDLHTKCVVDVDANKVILNPVNTNLSKGDARGQPKVFAYDHCFWSMDESVKEKYAGQDIVFKCLGENILQNAFDGYNACIFAYGQTGSGKSYTMMGTADQPGLIPRLCSGLFERTQKEENEEQSFKVEVSYMEIYNEKVRDLLDPKGSRQTLKVREHSVLGPYVDGLSKLAVTSYKDIESLMSEGNKSRTVAATNMNEESSRSHAVFKITLTHTLYDVKSGTSGEKVGKLSLVDLAGSERATKTGAAGDRLKEGSNINKSLTTLGLVISALADQSAGKNKNKFVPYRDSVLTWLLKDSLGGNSKTAMVATVSPAADNYDETLSTLRYADRAKHIVNHAVVNEDPNARIIRDLREEVEKLREQLTKAEAMKSPELKDRLEESEKLIQEMTVTWEEKLRKTEEIAQERQKQLESLGISLQSSGIKVGDDKCFLVNLNADPALNELLVYYLKEHTLIGSANSQDIQLCGMGILPEHCIIDITSEGQVMLTPQKNTRTFVNGSSVSSPIQLHHGDRILWGNNHFFRLNLPKKKKKAEREDEDQDPSMKNENSSEQLDVDGDSSSEVSSEVNFNYEYAQMEVTMKALGSNDPMQSILNSLEQQHEEEKRSALERQRLMYEHELEQLRRRLSPEKQNCRSMDRFSFHSPSAQQRLRQWAEEREATLNNSLMRLREQIVKANLLVREANYIAEELDKRTEYKVTLQIPASSLDANRKRGSLLSEPAIQVR

SEQ ID NO: 367 - protein, 162 aa, Homo sapiens
  misc_feature: Incyte ID No: LG:233933.5.orf3:2000MAY19
PRQHFCMQYSLQVVTATCKFGMNALLLSAWFGHLRILQILVNSGAKIHCESKEGNTALHLAAGRGHMAVLQRLVDIGLDLEEQNAEGLTALHSAAGGSHPDCVQLLLRAGSTVNALTQKNLSCLHYAALSGSEDVSRVLIHAGGCANVVDHQGASPLHLAVR

SEQ ID NO: 368 - protein, 635 aa, Homo sapiens
  misc_feature: Incyte ID No: LI:290344.1.orf2:2000MAY01
ALVFMQPMVMQGCPYTLPRCHDWQAADQFHHSSSLRSTCPHPQVRAAVTSPAPPQDGAGVPCLSLKLLNGSVGASGPLEPPAMNLCWNEIKKKSHNLRARLEAFSDHSGKLQLPLQEIIDWLSQKDEELSAQLPLQGDVALVQQEKETHAAFMEEVKSRAPYIYSVLESAQAFLSQHPFEELEEPHSESKDTSPKQRIQNLSRFVWKQATVASELWEKLTARCVDQHRHIERTLEQLLEIQGAMEELSTTLSQAEGVRATWEPIGDLFIDSLPEHIQAIKLFKEEFSPMKDGVKLVNDLAHQLAISDVHLSMENSQALEQINVRWKQLQASVDERLKQLQDAHRDFGPGSQHFLSSSVQVPWERAISPNKVPYYINHQAQTTCWDHPKMTELYQTLADLNNIKFSAYRTAMKLRRVQKALRLDLVTLTTALEIFNEHDLQASEHVMDVVEVIHCLTALYERLEEERGILVNVPLCVDMSLNWLLNVFDSGRSGKMRALSFKTGIACLCGTEVKEKLQYLFSQVANSGSQCDQRHLGVLLHEAIQVPRQLGEVAAFGGSNVEPSVRSCFRFSTGKPVIEASQFLEWVNLEPQSMVWLPVLHRVTIAEQVKHQTKCSICSAVPHQGVQVPESEAIQR

SEQ ID NO: 369 - protein, 433 aa, Homo sapiens
  misc_feature: Incyte ID No: LI:410742.1.orf3:2000MAY01
QIWMKSTQIIGLQYISLPLGMKEIGLKYKRDPRTNEGILKVVKALDYEQLQSVKLSIAVKNKAEFHQSVISRYRVQSTPVTIQVINVREGIAFRPASKTFTVQKGISSKKLVDYILGTYQAIDEDTNKAASNVKYVMGRNDGGYLMIDSKTAEIKFVKNMNRDSTFIVNKTITAEVLAIDEYTGKTSTGTVYVRVPDFNDNCPTAVLEKDAVCSSSPSVVVSARTLNNRYTGPYTFALEDQPVKLPAVWSITTLNATSALLRAQEQIPPGVYHISLVLTDSQNNRCEMPRSLTLEVCQCDNRGICGTSYPTTSPGTRYGRPHSGRLGPAAIGLLLLGLLLLLLAPLLLLTCDCGAGSTGGVTGGFIPVPDGSEGTIHQWGIEGAHPEDKEITNICVPPVTANGADFMESSEVCTNTYARGTAVEGTSGNGNDH

SEQ ID NO: 370 - protein, 531 aa, Homo sapiens
  misc_feature: Incyte ID No: LG:406568.1.orf3:2000MAY19
  unsure 148, 291: unknown or other
ACHLPPCLLLAALNAWSFKLLLGLTKQGPCLPLATEEDSVNTNPSTEDELLASLSAEELKELERELEDIEPDRNLPVGLRQKSLTEKTPTGTFSREALMAYWEKESQKLLEKERLGECGKVAEDKEESEEELIFTESNSEVSEEVYTXEEEEESQEEEEEEDSDEEERTIETAKGINGTVNYDSVNSDNSKPKIFKSQIENINLTNGSNGRNTESPAAIHPCGNPTVIEDALDKIKSNDPDTTEVNLNNIENITTQTLTRFAEALKDNTVVKTFSLANTHADDSAAMAIAXMLKVNEHITNVNVESNFITGKGILAIMRALQHNTVLTELRFHNQRHIMGSQVEMEIVKLLKENTTLLRLGYHFELPGPRMSMTSILTRNMDKQRQKRLQEQKQQEGYDGGPNLRTKVWQRGTPSSSPYVSPRHSPWSSPKLPKKVQTVRSRPLSPVATPPPPRDSSTPREKAHYQKHCRSHQTTGECPTGITKWTKKEKREKGQETAKQYSKGNKKFSEVSAREENGRQFPTFYPTEISS

SEQ ID NO: 371 - protein, 257 aa, Homo sapiens
  misc_feature: Incyte ID No: LI:283762.1.orf2:2000MAY01
KAFFIWWQSCWNRGNQSFKFLEQILWSNLQILKKTHHPTHRRYDFFVSRFSAMCHSCHSDPEIRTEIRIAGIRGIQGVVRKTVNDELRATIWEPQHMDKIVPSLLFNMQKIEEVDSRIGPPSSPSATDKEENPAVLAENCFRELLGRATFGNMNNAVRPVFAHLDHHKLWDPNEFAVHCFKIIMYSIQAQYSHHVIQEILGHLDARKKDAPRVRAGIIQVLLEAVAIAAKGSIGPTVLEVFNTLLKHLRLSVEFESK

SEQ ID NO: 372 - protein, 242 aa, Homo sapiens
  misc_feature: Incyte ID No: LI:347687.113.orf1:2000MAY01
QPCGFQGAENRRKLAYMRTDWPEEQQLLVALFCGCGHEALTGTEKLIETYFSKNYQDYEYLINVIHAFQYVIYGTASFFFLYGALLLAEGFYTTGAVRQIFGDYKTTICGKGLSATFVGITYALTVVWLLVFACSAVPVYIYFNTWTTCQSIAFPSKTSASIGSLCADARMYGVLPWNAFPGKVCGSNLLSICKTAEFQMTFHLFIAAFVGAAATLVSLLTFMIAATYNFAVLKLMGRGTKF

SEQ ID NO: 373 - protein, 60 aa, Homo sapiens [sequence omitted]

SEQ ID NO: 374 - protein, 157 aa, Homo sapiens
  misc_feature: Incyte ID No: LG:451710.1.orf1:2000FEB18
PGTPNPAPPPPRVHPSSWRAPIQEMAVPLLTKKIVKKRVKQFKRPHLDRYKCLKPSWRRPKGIDSRVRRKFKGCTLMPNIGYGSDKSTRHYLPNKFKKFVVHNVSELELLMMHNRTYCAEIAHNVSTKKRKEIVERAAQLDIVVTNKLARLRSQEDE

SEQ ID NO: 375 - protein, 158 aa, Homo sapiens
  misc_feature: Incyte ID No: LG:455771.1.orf3:2000FEB18
ASCSRRREALQRTSVNMGKTRGMGAGRKLKTHRRNQRWADKAYKKSHLGNEWKKPFAGSSHAKGIVLEKIGIEAKQPNSAIRKCARVQLVKNGKKIAAFVPNDGCLNYIEENDEVLIAGFGRKGHAVGDIPGVRFKVVKVSGVSLLALFKEKKEKPRS

SEQ ID NO: 376 - protein, 238 aa, Homo sapiens
  misc_feature: Incyte ID No: LG:452089.1.orf2:2000FEB18
LGKHRRPPPPKDGRRRGYGRLLAPMAHEKKLSNPMREIKVQKLVLNISVGESGDRLTRAAKVLEQLSGQTPVFSKARYTVRSFGIRRNEKIACYVTVRGEKAMQLLESGLKVKEYELLRRNFSDTGCFGFGIQEHIDLGIKYDPSTGIYGMDFYVVLERAGYRVARRRRCKSRVGIQHRVTKEDSMKWFQVKYEGVILKQGSGLHVPPLTCGQNSSLVSSPPPCQRKTTTHLARLFWV

SEQ ID NO: 377 - protein, 102 aa, Homo sapiens
  misc_feature: Incyte ID No: LG:246415.1.orf3:2000FEB18
LPPVRASNMMKKRRNNGRTKKGRGHVQPICDTNCAQCVPKDKAINKFIIGNTVEAAAVRDISEASVFDAYVLPKLYLKLHYCLSCAIHSRVVRNRSCEAHKD

SEQ ID NO: 378 - protein, 102 aa, Homo sapiens
  misc_feature: Incyte ID No: LG:414144.10.orf1:2000FEB18
VYWCRELILKRGQAKVKNKTIPLTDNTVIEEHLGKFGVICLEDLIHEIAFPGKHFQEISWFLCPFHLSVARHATKNRVGFLKEMGTPGYRGERINQLIRQLN

SEQ ID NO: 379 - protein, 177 aa, Homo sapiens
  misc_feature: Incyte ID No: LG:1101445.1.orf3:2000FEB18
GTMEAVPEKKKKVAAAPGTLKKKKVPAVPETLKKKRRNFAELKVKRLRKKFALKTLRKARRKLIYEKAKHYHKEYRQMYRTEIRMARMARKAGNFYVPAEPKLAFVIRIRGINGVSPKVRKVLQLLRLRQIFNGTFVKLNKASVNMLRIVEPYIAWGVPQPEVSKRAHLQTRLWQNQ

SEQ ID NO: 380 - protein, 86 aa, Homo sapiens
  misc_feature: Incyte ID No: LG:452134.1.orf2:2000FEB18
LPSYAPEIVPATLRRSHSETGRPQPKGLKGERPARLTRGEADRDTYRQIAVPPDADRKAEAEAGAGSETEFQFRGRFGCGGGQPPQ

SEQ ID NO: 381 - protein, 97 aa, Homo sapiens
  misc_feature: Incyte ID No: LI:903021.1.orf1:2000FEB01
RNFTELKIKRLRNKFAQKMLLKARRKLIYEKAKHYHKEYMQMYRTEIQISRIARKAGNFYVSAEPKLAFVIRIGGYQLGEPKGLKGVATSLPSSNLQ

SEQ ID NO: 382 - protein, 82 aa, Homo sapiens
  misc_feature: Incyte ID No: LI:246422.1.orf1:2000FEB01
KKRKQVPKFTLDRTHPVEDGIMDAANFEQFFQERIKMNGKAGNFGGGVVTHRREQEQDQRDIQAALFQQVFEISHQKISEEE

SEQ ID NO: 383 - protein, 180 aa, Homo sapiens
  misc_feature: Incyte ID No: LG:449404.1.orf1:2000MAY19
SQPKSCLRSGHPSLHATMSRRKTREPKEENVTLGPTVREGEYVFGVAHIFASFNDTFIHITDLSGRETLVRITGGMKVKADRDESSPYAAMLAAQDVAQRCKELGITALHIKLRATGGNKTKTPGPGAQSALRALARSGMKIGRIEDVTPVPTDSTRRKGGRRGKEDCRRHHYCVPFAGS

SEQ ID NO: 384 - protein, 118 aa, Homo sapiens
  misc_feature: Incyte ID No: LG:449413.1.orf3:2000MAY19
PRCFRLPQRRRPSQPVPSSATMGKTRGMGAGRKLKTHRRNQRWADKAYKKSHLGNEWKKPFAGSSHAKGIVLEKIGIEAKQPNSAIRKCARVQLVKNGKKIAAFVPNDGCLNYIEENV

SEQ ID NO: 385 - protein, 164 aa, Homo sapiens
  misc_feature: Incyte ID No: LG:450105.1.orf2:2000MAY19
PSAARPPYSRYRARRHHLRRSNMGKTRGMGAGRKLKTHRRNQRWADKAYKKSHLGNEWKKPFAGSSHAKGIVLEKIGIEAKQPNSAIRKCARVQLVKNGKKIAAFVPNDGCLNYIEENDEVLIAGFGRKGHAVGDIPGVRFKVVKVSGVSLLALFKEKKEKPRS

SEQ ID NO: 386 - protein, 101 aa, Homo sapiens
  misc_feature: Incyte ID No: LG:460809.1.orf3:2000MAY19
AWVEWASRSAPRAHREIQKFAMKEMGTPNLHIDVRLNKALWAKGIRNVPYHIHMKLPRKLNEDEDSPDKLYALVPTYTCYHFHKSIDRQCGRELTTDGSIH

SEQ ID NO: 387 - protein, 259 aa, Homo sapiens
  misc_feature: Incyte ID No: LG:481781.1.orf3:2000MAY19
RSVRRRSSSSRRRRVAAPHLELATMARGLKKHLKRLNAPKHWMLDKLGGAFAPKPSSGPHKSRECLPLILIIRNRLKYALTYREVISILMQRHVLVDGKVRTDKTYPAGFMDVISIPKTNENYRLLYDTKGRFRLHPIRDEDAKFKLCKVRSVQFGQKGIPYLNTYDGRTIRYPDPLIKANDTIKIDLETNKIVDFIKFDVGNVVMVTGGRNTGRVGVIKNREKHKGSFETIHVEDSWATGSPPVWATCSPSARVISRG

SEQ ID NO: 388 - protein, 184 aa, Homo sapiens
  misc_feature: Incyte ID No: LG:1101153.1.orf2:2000MAY19
RRRPFLLRSFAAAMVKYSQEPGNPTKSAKAMGRDLRVHFKNTRETAFALRKLPLTKAKRYLEDVIAHKQAIPFRRYCGGVGRTAQAKSRHSNGQGRWPVKSARFILDLLKNAESNADVKGLDVDNLYVSHIQVNQAQKQRRRTYRAHGRINPYMSSPCHIELILSEKEEPVKKEADNIVAARKQ

SEQ ID NO: 389 - protein, 152 aa, Homo sapiens
  misc_feature: Incyte ID No: LI:257695.20.orf2:2000MAY01
APRGEGCLVHASEPCRPRARCSLCRSSDARRQRQLWAHCKRGNGLIKVNGRPLEMIEPRTLQYKLLEPVLLLGKERFAGVDIRVRVKGGGHVPQIYGESQELGAWRRWLWEGGLHSAPVPFNCVSFSQLSVSPSPKPWWPITRNVSEHGSFP

SEQ ID NO: 390 - protein, 158 aa, Homo sapiens; identical to SEQ ID NO: 375
  misc_feature: Incyte ID No: LI:455771.1.orf3:2000MAY01

SEQ ID NO: 391 - protein, 94 aa, Homo sapiens
  misc_feature: Incyte ID No: LI:274551.1.orf1:2000MAY01
PFTVTQLQPTTLQSFPCLSVLQRLSHVSGFLRSSTLIGLIWCSAQRATPSLTYIGSSHLDASTQRWAWPLSKALAALQVPPARPSWLRAVFSLL

SEQ ID NO: 392 - protein, 83 aa, Homo sapiens
  misc_feature: Incyte ID No: LI:035973.1.orf3:2000MAY01
GCLAGIRKDNKMKGTSPFGKCRDMIHKLCCLCGSKAYHLQKSTCGKCGSPAKRKRKCNWTATAKRKYHGDWLNEAPKHCILQI

SEQ ID NO: 393 - protein, 174 aa, Homo sapiens
  misc_feature: Incyte ID No: LG:978427.5.orf2:2000FEB18
  unsure 151: unknown or other
WWVCDGCLCFRTTPAVLFWQWINQSFNAVVNYTNRSGDAPLTVNELGTAYVSATTGAVATALGLNALTKHVSPLIGRFVPFAAVAAANCINIPLMRQRELKVGIPVTDENGNRLGESANAAKQAITQVVVSRILMAAPGMGIPPFIMNTLXKKAFLKRFPMDECTHSSWVSWIL

SEQ ID NO: 394 - protein, 183 aa, Homo sapiens [sequence omitted]

SEQ ID NO: 395 - protein, 399 aa, Homo sapiens
  misc_feature: Incyte ID No: LI:034583.1.orf1:2000FEB01
VQHATVIPETMAGTQQLADWRNTHAHGSHYNPIMQQPALLTGHVTLPAAQPLNVGVAHVMRQQPTSTTSSRKSKQHQSSVRNVSTCEVSSSQAISSPQRSKRVKENTPPRCAMVHSSPACSTSVTCGWGDVASSTTRERQRQTIVIPDTPSPTVSVITISSDTDEEEEQKHAPTSTVSKQRKNVISCVTVHDSPYSDSSSNTSPYSVQQRAGHNNANAFDTKGSLENHCTGNPRTIIVPPLKTQASEVLVECDSLVPVNTSHHSSSYKSKSSSNVTSTSGHSSGSSSGAITYRQQRPGPHFQQQQPLNLSQAQQHITTDRTGSHRRQQAYITPTMAQAPYSFPHNSPSHGTVHPHLAAAAAAAHLPTQPHLYTYTAPAALGSTGTVAHLVASQGSARHT

SEQ ID NO: 396 - protein, 301 aa, Homo sapiens
  misc_feature: Incyte ID No: LI:333307.2.orf1:2000FEB01
  unsure 286: unknown or other
TQFSDNNNEKLSPKPGTGEPVLSLHYSTEGTTTSTIKLNFTDEWSSIASSSRGIGSHCKSEGQEESFVPQSSVQPPEGDSETKAPEESSEDVTKYQEGVSAENPVENHINITQSDKFTAKPLDSNSGERNDLNLDRSCGVPEESASSEKAKEPETSDQTSTESATNENNTNPEPQFQTEATGPSAHEETSTRDSALQDTDDSDDDPVLIPGARYRAGPGDRFNIRGTTIGDRIMRRSAVARIQEFFRRRKERKEMEELDTLNIRRPLVKMVYKGHRNSRTMIKEAXFWGANFVMSGSDCGH

SEQ ID NO: 397 - protein, 105 aa, Homo sapiens
  misc_feature: Incyte ID No: LI:814710.2.orf2:2000FEB01
EGPEGKWKSPKFKMPEMHFKTPKISMPDIDLNLTGPKIKGDVDVTGPKVEGDLKGPEVDLKGPKVDIDVPDVNVQGPDWHLKMPKMKMPKFSMPGFKGEGPGSRS

SEQ ID NO: 398 - protein, 153 aa, Homo sapiens
  misc_feature: Incyte ID No: LG:414732.1.orf1:2000MAY19
WYRRLLRESGSTMDIPVPSSFNDVGQDWRLRHFVDQMWYEREVTFLEQWTQDLHTRVVLRIVSAHSYAIVWVNGVDALEHEGSTSPLTPTSVACSRWGPCPPASASLSPSATCSSPPPCHQGASSTWPTPPRGYHPASTADTHLPVPPRGALH

SEQ ID NO: 399 - protein, 161 aa, Homo sapiens
  misc_feature: Incyte ID No: LG:413910.6.orf1:2000MAY19
SMLASQGVLLHPYGVPMIVPAAPYLPGLIQGNQEAAAAPDTMAQPYASAQFAPPQNGIPAEYTAPHPHPAPEYTGQTTVPEHTLNLYPPAQTHSEQSPAVFLFVITRAVALFTSILRPSTTVPCNFSLALSASALFSKVTKPNPFEPRSLKIISTSKILPN

SEQ ID NO: 400 - protein, 153 aa, Homo sapiens; identical to SEQ ID NO: 398
  misc_feature: Incyte ID No: LI:414732.2.orf1:2000MAY01

SEQ ID NO: 401 - protein, 135 aa, Homo sapiens
  misc_feature: Incyte ID No: LI:900264.2.orf3:2000MAY01
RQIVSVLSCRFDSNQLPANAPIEDRRSAATCLQTRGLLLGVFDGHAGCACSQAVSERLFYYIAVSLLPHETLLEIENAVESGRALLPILQWHKHPNDYFSKEASKLYFNSLRTYWQGAYRPQHWVSRLILMLRRL

SEQ ID NO: 402 - protein, 129 aa, Homo sapiens
  misc_feature: Incyte ID No: LI:335593.1.orf3:2000MAY01
  unsure 28, 39-40: unknown or other
RGAGTAALPSRLLPSSAARSSLGIHLLXLLLLIHSFPHXXLLLGFSPRPASPRALPLPLPVLPGPLLPLIHSPLSLLHSLPLSPFFFFFHPPSLTPPPFPCLLSDTALQLLLSPAPSPVRTNQQHCFFS

SEQ ID NO: 403 - protein, 299 aa, Homo sapiens
  misc_feature: Incyte ID No: LI:1189543.1.orf1:2000MAY01
EFRQNKRENLLPVAAAGTANMMAAAPIQQNGTHTGVPIDLDPPDSRKRPLEAPPEAGSTKRTNTGEDGQYFLKVLIPSYAAGSIIGKGGQTIVQLQKETGATIKLSKLSKSKDFYPGTTERVCLIQGTVEALNAVHGFIAEKIREMPQNVAKTEPVSILQPQTTVNPDRIKQTLPSSPTTTKSSPSDPMTTSRANQVKIIVPNSTAGLIIGKGGATVKAVMEQSGAWVQLSQKPDGINLQERVVTVSGEPEQNRKAVELIIQKIQEDPQSGSCLNISYANVTGPVGKFQSNRISLCKHC

SEQ ID NO: 404 - protein, 142 aa, Homo sapiens
  misc_feature: Incyte ID No: LG:455450.1.orf1:2000FEB18
GGGILRRSGSSSSSSSSSSEDDGMGGRRKKGLKEKIKEKMPGGHREGQGQATATGAYGGTGYVAGPTTGGPHEKKGVVEKIKEKIPGGHKDYDQHQHTTAATGGGGGYGGTTDTTYGTTTTEGTHEKKGFMDKIKEKLPGQH

SEQ ID NO: 405 - protein, 168 aa, Homo sapiens
  misc_feature: Incyte ID No: LG:1040978.1.orf2:2000FEB18
SYLRSRGQPPPRRSHALRARRLSSVSASLPLPSRLTHMASIAGSSALSFARPVKAINTNSLAFSPARKGNTFLRLQPMPMRSVSCAAKKDTTDKVCEIVKKQLALPDHTEVCGESKFSELGADSLDTVEIVMSLEEHFDISVEESSAQTIATVEDAADLIDKLVAGKA

SEQ ID NO: 406 - protein, 117 aa, Homo sapiens
  misc_feature: Incyte ID No: LG:446649.1.orf2:2000FEB18
LKAREQAQKREAIQVTSPVCLRLILRKAGEEVKRLKTQPTDEEMLFIYSHFKQATVGDVNTDRPGLLDLKGKAKWDSWNKLKGTSKENAMKTYVEKVEELKKKYGILTTRFGGQPHV

SEQ ID NO: 407 - protein, 804 aa, Homo sapiens
  misc_feature: Incyte ID No: LG:132147.3.orf3:2000FEB18
ASSAAQDDYARHVRDPPAVAVAAPKARASAPDAVVTPPRLAVAPVPVLPAASAAGDMSNPGSRRNGPVKLHLTVLCAKNLVKKDFFRLPDPFAKVVVDGSGQCHSTDTVKNTLDPKWNQHYDLYIGKSDSVTISVWNHKKIHKKQGAGFLGCVRLLSNAINRLKDTGYQRLDLCKLGPNDNDTVRGQIVVSLQSRDRIGTGGQVVDCSRLFDNDLPDGWEERRTASGRIQYLNHITRTTQWERPTRPASEYSSPGRPLSCFVDENTPISGTNGATCGQSSDPRLAERRVRSQRHRNYMSRTHLHTPPDLPEGYEQRTTQQGQVYFLHTQTGVSTWHDPRVPRDLSNINCEELGPLPPGWEIRNTATGRVYFVDHNNRTTQFTDPRLSANLHLVLNRQNQLKDQQQQQVVSLCPDDTECLTVPRYKRDLVQKLKILRQELSQQQPQAGHCRIEVSREEIFEESYRQVMKMRPKDLWKRLMIKFRGEEGLDYGGVAREWLYLLSHEMLNPYYGLFQYSRDDIYTLQINPDSAVNPEHLSYFHFVGRIMGMAVFHGHYIDGGFTLPFYKQLLGKSITLDDMELVDPDLHNSLVWILENDITGVLDHTFCVEHNAYGEIIQHELKPNGKSIPVNEENKKEYVRLYVNWRFLRGIEAQFLALQKGFNEVIPQHLLKTFDEKELELIICGLGKIDVNDWKVNTRLKHCTPDSNIVKWFWKAVEFFDEERRARLLQFVTGSSRVPLQGFKALQGAAGPRLFTIHQIDACTNNLPKAHTCFNRIDIPPYESYEKLYEKLLTAIEETCGFAVE

SEQ ID NO: 408 - protein, 220 aa, Homo sapiens
  misc_feature: Incyte ID No: LI:036034.1.orf1:2000FEB01
TIHLKTLIIVWKRYSDFKKLHKELWQIHKNLFRHSELFPPFAKGIVFGRFDETVIEERRQYAEDLLQFSANIPALYNSKQLEDFFKGGIINDSSELIGPAEAHSDSLIDTFPECSTEGFSSDSDLVSLTVDVDSLAELDDGMASNQNSPIRTFGLNLSSDSSALGAVASDSEQSKTEEERESRSLFPGSLKPKLGKRDYLEKAGELIKLALKKEEEDDYE

SEQ ID NO: 409 - protein, 168 aa, Homo sapiens
  misc_feature: Incyte ID No: LG:162161.1.orf2:2000MAY19
QDHQFAPQSTMSRSRQPPLVTGISPNEGIPWTKVTIRGENLGTGPTDLIGLTICGHNCLLTAEWMSASKIVCRVGQAKNDKGDIIVTTKSGGRGTSTVSFKLLKPEKIGILDQSAVWVDEMNYYDMRTDRNKGIPPLSLRPANPLGMEIEPSTFSQKDLEMLFHGMSA

SEQ ID NO: 410 - protein, 108 aa, Homo sapiens
  misc_feature: Incyte ID No: LG:407214.10.orf2:2000MAY19
KSRMDLDVVNMFVIAGGTLAIPILAFVASFLLWPSALIRIYYWYWRRTLGMQVRYVHHEDYQFCYSFRGRPGHKPSILMLHGFSGHKDMWLSVVKVPSKEPALGLRGH

SEQ ID NO: 411 - protein, 314 aa, Homo sapiens
  misc_feature: Incyte ID No: LG:204626.1.orf1:2000MAY19
GVARKKKIVIKEEPKRRKGKMKDRLQELKQRTKEIELSRDSHVSTTETEEQGVFLQQAVIYEREPVAERHLHEIQKLQESINNLADNVQKFGQQQKSLVASMRRFSLLKRESTITKEIKIQAEYINRSLNDLVKEVKKSEVENGPSSVVTRILKSQHAAMFRHFQQIMFIYNDTIAAKQEKCKTFILRQLEVAGKEMSEEDVNDMLHQGKWEVFNESLLTEINITKAQLSEIEQRHKELVNLENQIKDLRDLFIQISLLVEEQGESINNIEMTVNSTKEYVNNTKEKFGLAVKYKKRNPCRVLCCWCCPCCSSK

SEQ ID NO: 412 - protein, 143 aa, Homo sapiens
  misc_feature: Incyte ID No: LI:007401.1.orf2:2000MAY01
MASESDTEEFYDAPEDVHLGGGYPVGSPGKVGLSTFKETENTAYKVGNESPVQELKQDVSNKIIESIIEESQKVLQLEDDSLDSTGKELSDQATASPIVARTDLSNIPGLLAIDQVLPEESQKAESQNTFEETELEFKKMLSF

SEQ ID NO: 413 - protein, 122 aa, Homo sapiens
  misc_feature: Incyte ID No: LI:476342.1.orf1:2000MAY01
GRTRVSGPVRNNTDPIHAGRRWSSSSPGRPCARSSWRCSCSHTTTAGRRRRWWRRPGCAWARASTTRSPASPTASAATSASRRTAGGPPATATSATAGARRRAKQSSSNTLGLPELNSSSTK

SEQ ID NO: 414 - protein, 86 aa, Homo sapiens
  misc_feature: Incyte ID No: LI:1072759.1.orf2:2000MAY01
RPEEDMRQLVHGSQRGTLRKMGLQPRHSSLWCQFLVGMVTTFWKQGAIIALVSRRWKVTRKGWQCQVRTTLACRLLDCILPPNSYN

SEQ ID NO: 415 - protein, 213 aa, Homo sapiens
  misc_feature: Incyte ID No: LG:998857.1.orf3:2000FEB18
RQWQLLCCPCCCGGCWARVEVQGWGHGLAPGLGWSCPAGPGGHRGCGCPGVGRTWKAARSRGSWVSWVSWGTWRSWRSWGSWGSWDSRAPPPEPSRTPRGTNRSRTSPPACRRASRSGPRAPTPPPRPQRRSAAACGWRPRSGRPGRGLSWRPRRRPGARQRSWSASFGRCRCRARRPTACGAGSDGLALAGTRASRRARCRRSRSRAGCGGS

SEQ ID NO: 416 - protein, 263 aa, Homo sapiens
  misc_feature: Incyte ID No: LG:482261.1.orf1:2000FEB18
LLNFVSLSLFLFSFPRLHREGESLRVVYQAGSPTSLAPNTVSSNPGEVTPERGRCEERSVQELPRTCGRPCGKLVHSEHSRDTMGQSKSKHSAYLHFIKLLLKRAGIKASTENLITLFPTVEQYCPWFPEHGTMDFKDWEQVGIALKQVCKEGKFIPLTAWSNWAIVKAASEPFQSENEAYPPAERISAEEGGDAAEGGEDSEEDFEENTDKPGDELISFEEHVGPSAAPKIEKPYMPRCLKQRRALRSSRLLIGIIRSGRLQ

SEQ ID NO: 417 - protein, 175 aa, Homo sapiens
  misc_feature: Incyte ID No: LG:480328.1.orf1:2000FEB18
VRCGGQSGSRCERVPQKKTWLPKCLSPSASLGLALAVAGGMVNSALCNVDAGHRAAIFDQFRGVQNIVVGEGTHFLIPCVQKPIIFDCCSQPRSAPVITGSKDLQNVNITLCILFRPITSQLPRIFTSIGEDYDECVLPFITTEILKSLVARFDAGELITQRELVSSQVSNNLME

SEQ ID NO: 418 - protein, 272 aa, Homo sapiens
  misc_feature: Incyte ID No: LG:311197.1.orf2:2000MAY19
QVPFPSHIPIYVCLCVQQTPAFATMLSSTDFTFASWELVVRVDHPNEEQQKDVTLRVSGDLHVGGVMLKLVEQINISQDWSDFALWWEQKHCWLLKTHWTLDKYGVQADAKLLFTPQHKMLRLRLPNLKMVRLRVSFSAVVFKAVSDICKILNIRRSEELSLLKPSGDYFKKKKKKDKNNKEPIIEDILNLESSPTASGSSVSPGLYSKTMTPIYDPINGTPASSTMTWFSDSPLTEQNCSILAFSQPPQSPEALADMYQPRSLVDTAKLNA

SEQ ID NO: 419 - protein, 167 aa, Homo sapiens
  misc_feature: Incyte ID No: LG:1054883.1.orf1:2000MAY19
  unsure 2: unknown or other
RXRQPLLQSHPEADWSTHGRSMRKLIVRFIFLKFWTYTVRASTNLTQNGDCSQCIYQVTEVGQQIKTIFLFYSYYECMETLKETCLYNATQYKVCSPRNDRPDACYNPSEPAATTVFEIRTGLLLGDTSKIITRTEEKEIPKQITLRFDACAAINSKKLEIGCGSLN

SEQ ID NO: 420 - protein, 59 aa, Homo sapiens
  misc_feature: Incyte ID No: LG:399395.1.orf2:2000MAY19
SQHFGRPRQEDHLSPGVQDQPGQHSETLTQKIKRKDKNTRMAKQTSVHQPGGILYSLLK

SEQ ID NO: 421 - protein, 216 aa, Homo sapiens
  misc_feature: Incyte ID No: LG:380497.2.orf1:2000MAY19
SPRPLQSAGEGVTHVLILLESPARPVAAVTQVQRRRYHRLSDMSMLAERRRKQKWAVDPQNTAWSNDDSKFGQRMLEKMGWSKGKGLGAQEQGATDHIKVQVKNNHLGLGATINNEDNWIAHQDDFNQLLAELNTCHGQETTDSSDKKEKKSFSLEEKSKISKNRVHYMKFTKGRCQSLHSRGERNHDNQRLHHPGVLCQADGSTEEQAPGSSSRV

SEQ ID NO: 422 - protein, 162 aa, Homo sapiens
  misc_feature: Incyte ID No: LI:272913.22.orf1:2000MAY01
SATAAAPRERKMAPHGPGSLTTLVPWAAALLLALGVERALALPEICTQCPGSVQNLSKVAFYCKTTRELMLHARCCLNQKDPGPNFHQAHTTVIIDLQANPLKGDLANTFRGFTQLQTLILPQHVNCSGGINAWNTITSYIDNQICQGQKNLCNNTGDPEMC

What is claimed is:

1. An isolated polynucleotide comprising a polynucleotide sequence selected from the group consisting of:
a) a polynucleotide sequence selected from the group consisting of SEQ ID NO:1-211,
b) a naturally occurring polynucleotide sequence having at least 90% sequence identity to a polynucleotide sequence selected from the group consisting of SEQ ID NO:1-211,
c) a polynucleotide sequence complementary to a),
d) a polynucleotide sequence complementary to b), and
e) an RNA equivalent of a) through d).

2. An isolated polynucleotide of claim 1, comprising a polynucleotide sequence selected from the group consisting of SEQ ID NO:1-211.

3. An isolated polynucleotide comprising at least 60 contiguous nucleotides of a polynucleotide of claim 1.

4. A composition for the detection of expression of diagnostic and therapeutic polynucleotides comprising at least one of the polynucleotides of claim 1 and a detectable label.

5. A method for detecting a target polynucleotide in a sample, said target polynucleotide having a sequence of a polynucleotide of claim 1, the method comprising:
a) amplifying said target polynucleotide or fragment thereof using polymerase chain reaction amplification, and
b) detecting presence or absence of said amplified target polynucleotide or fragment thereof, and, optionally, if preset the amount thereof.

6. A method for detecting a target polynucleotide in a sample, said target polynucleotide comprising a sequence of a polynucleotide of claim 1, the method comprising:
a) hybridizing the sample with a probe comprising at least 20 contiguous nucleotides comprising a sequence complementary to said target polynucleotide in the sample, and which probe specifically hybridizes to said target polynucleotide, under conditions whereby a hybridization complex is formed between said probe and said target polynucleotide or fragments thereof, and
b) detecting the presence or absence of said hybridization complex, and, optionally, if present, the amount thereof.

7. A method of claim 5, wherein the probe comprises at least 30 contiguous nucleotides.

8. A method of claim 5, wherein the probe comprises at least 60 contiguous nucleotides.

9. A recombinant polynucleotide comprising a promoter sequence operably linked to a polynucleotide of claim 1.

10. A cell transformed with a recombinant polynucleotide of claim 9.

11. A transgenic organism comprising a recombinant polynucleotide of claim 9.

12. A method for producing a diagnostic and therapeutic polypeptide, the method comprising:
a) culturing a cell under conditions suitable for expression of the diagnostic and therapeutic polypeptide, wherein said cell is transformed with a recombinant polynucleotide of claim 9, and
b) recovering the diagnostic and therapeutic polypeptide so expressed.

13. A purified diagnostic and therapeutic polypeptide (DITHP) encoded by at least one of the polynucleotides of claim 2.

14. An isolated antibody which specifically binds to a diagnostic and therapeutic polypeptide of claim 13.

15. A method of identifying a test compound which specifically binds to the diagnostic and therapeutic polypeptide of claim 13, the method comprising the steps of:
a) providing a test compound;
b) combining the diagnostic and therapeutic polypeptide with the test compound for a sufficient time and under suitable conditions for binding; and
c) detecting binding of the diagnostic and therapeutic polypeptide to the test compound, thereby identifying the test compound which specifically binds the diagnostic and therapeutic polypeptide.

16. A microarray wherein at least one element of the microarray is a polynucleotide of claim 3.

17. A method for generating a transcript image of a sample which contains polynucleotides, the method comprising the steps of:
a) labeling the polynucleotides of the sample,
b) contacting the elements of the microarray of claim 16 with the labeled polynucleotides of the sample under conditions suitable for the formation of a hybridization complex, and
c) quantifying the expression of the polynucleotides in the sample.

18. A method for screening a compound for effectiveness in altering expression of a target polynucleotide, wherein said target polynucleotide comprises a polynucleotide sequence of claim 1, the method comprising:
a) exposing a sample comprising the target polynucleotide to a compound, under conditions suitable for the expression of the target polynucleotide,
b) detecting altered expression of the target polynucleotide, and
c) comparing the expression of the target polynucleotide in the presence of varying amounts of the compound and in the absence of the compound.

19. A method for assessing toxicity of a test compound, said method comprising:
a) treating a biological sample containing nucleic acids with the test compound;
b) hybridizing the nucleic acids of the treated biological sample with a probe comprising at least 20 contiguous nucleotides of a polynucleotide of claim 1 under conditions whereby a specific hybridization complex is formed between said probe and a target polynucleotide in the biological sample, said target polynucleotide comprising a polynucleotide sequence of a polynucleotide of claim 1 or fragment thereof;
c) quantifying the amount of hybridization complex; and
d) comparing the amount of hybridization complex in the treated biological sample with the amount of hybridization complex in an untreated biological sample, wherein a difference in the amount of hybridization complex in the treated biological sample is indicative of toxicity of the test compound.

20. An array comprising different nucleotide molecules affixed in distinct physical locations on a solid substrate, wherein at least one of said nucleotide molecules comprises a first oligonucleotide or polynucleotide sequence specifically hybridizable with at least 30 contiguous nucleotides of a target polynucleotide, said target polynucleotide having a sequence of claim 1.

21. An array of claim 20, wherein said first oligonucleotide or polynucleotide sequence is completely complementary to at least 30 contiguous nucleotides of said target polynucleotide.

22. An array of claim 20, wherein said first oligonucleotide or polynucleotide sequence is completely complementary to at least 60 contiguous nucleotides of said target polynucleotide

23. An array of claim 20, which is a microarray.

24. An array of claim 20, further comprising said target polynucleotide hybridized to said first oligonucleotide or polynucleotide.

25. An array of claim 20, wherein a linker joins at least one of said nucleotide molecules to said solid substrate.

26. An array of claim 20, wherein each distinct physical location on the substrate contains multiple nucleotide molecules having the same sequence, and each distinct physical location on the substrate contains nucleotide molecules having a sequence which differs from the sequence of nucleotide molecules at another physical location on the substrate.

27. An isolated polypeptide comprising an amino acid sequence selected from the group consisting of:
a) an amino acid sequence selected from the group consisting of SEQ ID NO:212-422,
b) a naturally occurring amino acid sequence having at least 90% sequence identity to an amino acid sequence selected from the group consisting of SEQ ID NO:212-422,
c) a biologically active fragment of an amino acid sequence selected from the group consisting of SEQ ID NO:212-422, and
d) an immunogenic fragment of an amino acid sequence selected from the group consisting of SEQ ID NO:212-422.
